(19) United States
(12) Patent Application Publication
(10) Pub. No.: US 2006/0275315 A1
(43) Pub. Date: Dec. 7, 2006

(54) Nucleic acids and proteins from streptococcus groups a & b

(75) Inventors: John Telford, Siena (IT); Vega Masignani, Siena (IT); Immaculada Margarit Y Ros, Siena (IT); Guido Grandi, Siena (IT); Claire Fraser, Rockville, MD (US); Herve Tettelin, Rockville, MD (US)

Correspondence Address: BANNER & WITCOFF, 1001 G STREET N W, SUITE 1100, WASHINGTON, DC, 20001, US

(73) Assignees: CHIRON Srl, Siena (IT); THE INSTITUTE FOR GENOMIC RESEARCH, Rockville, MD (US)

(21) Appl. No.: 10/513,024

(22) PCT Filed: May 2, 2003
(86) PCT No.: PCT/GB03/01882

§ 371 Date: Dec. 5, 2005

(30) Foreign Application Priority Data
May 2, 2002 (GB) 0210128.5

(51) Int. Cl. A61K 39/116; A61K 39/295; G06F 19/00; C07H 21/04; C12P 21/06; C12N 1/21; C12N 15/74; C07K 14/315

(52) U.S. Cl. 424/190.1; 435/69.1; 435/320.1; 435/252.3; 530/350; 536/23.7; 702/19; 424/203.1; 424/201.1

(57) ABSTRACT

The invention provides proteins from group B streptococcus (Streptococcus agalactiae) and group A streptococcus (Streptococcus pyogenes), including amino acid sequences and the corresponding nucleotide sequences.

[0001] All documents cited herein are incorporated by reference in their entirety.

### TECHNICAL FIELD

[0002] This invention relates to nucleic acid and proteins from the bacteria Streptococcus agalactiae (GBS) and Streptococcus pyogenes (GAS).

### BACKGROUND ART

[0003] Once thought to infect only cows, the Gram-positive bacterium Streptococcus agalactiae (or “group B streptococcus”, abbreviated to “GBS”) is now known to cause serious disease, bacteremia and meningitis, in immunocompromised individuals and in neonates. There are two types of neonatal infection. The first (early onset, usually within 5 days of birth) is manifested by bacteremia and pneumonia. It is contracted vertically as a baby passes through the birth canal. GBS colonises the vagina of about 25% of young women, and approximately 1% of infants born via a vaginal birth to colonised mothers will become infected. Mortality is between 50-70%. The second is a meningitis that occurs 10 to 60 days after birth. If pregnant women are vaccinated with type III capsule so that the infants are passively immunised, the incidence of the late onset meningitis is reduced but is not entirely eliminated.

[0004] The “B” in “GBS” refers to the Lancefield classification, which is based on the antigenicity of a carbohydrate which is soluble in dilute acid and called the C carbohydrate. Lancefield identified 13 types of C carbohydrate, designated A to O, that could be serologically differentiated. The organisms that most commonly infect humans are found in groups A, B, D, and G. Within group B, strains can be divided into 8 serotypes (Ia, Ib, Ia/c, II, III, IV, V, and VI) based on the structure of their polysaccharide capsule.

[0005] Group A streptococcus (“GAS”, S. pyogenes) is a frequent human pathogen, estimated to be present in between 5-15% of normal individuals without signs of disease. When host defences are compromised, or when the organism is able to exert its virulence, or when it is introduced to vulnerable tissues or hosts, however, an acute infection occurs. Diseases include puerperal fever, scarlet fever, erysipelas, pharyngitis, impetigo, necrotising fasciitis, myositis and streptococcal toxic shock syndrome. A genome sequence [accession AE004092] for GAS was published in 2001 [Ferretti et al. (2001) PNAS 98:4658-4663].

[0006] S. pyogenes is typically treated using antibiotics. Although S. agalactiae is inhibited by antibiotics, however, it is not killed by penicillin as easily as GAS. Prophylactic vaccination is thus preferable.

[0007] Current GBS vaccines are based on polysaccharide antigens, although these suffer from poor immunogenicity. Anti-idiotypic approaches have also been used (e.g. WO99/54457). There remains a need, however, for effective adult vaccines against S. agalactiae infection. There also remains a need for vaccines against S. pyogenes infection.

[0008] International patent application WO02/34771 discloses a large number of proteins and nucleic acids from GAS and GBS with the object of providing proteins which can be used in the development of vaccines, for diagnostic purposes, and as targets for antibiotics. It is an object of the present invention to provide further proteins which can be used in the development of vaccines, which can be used for diagnostic purposes, and which are targets for antibiotics.

### DISCLOSURE OF THE INVENTION

[0009] The invention provides proteins comprising the S. agalactiae amino acid sequences disclosed in the examples, and proteins comprising the S. pyogenes amino acid sequences disclosed in the examples. These amino acid sequences are the even-numbered SEQ IDs between 1 and 1372.

[0010] It also provides proteins comprising amino acid sequences having sequence identity to the S. agalactiae amino acid sequences disclosed in the examples, and proteins comprising amino acid sequences having sequence identity to the S. pyogenes amino acid sequences disclosed in the examples (in particular to even SEQ IDs 60-304). Depending on the particular sequence, the degree of sequence identity is preferably greater than 50% (e.g. 60%, 70%, 80%, 90%, 95%, 99% or more). These proteins include homologs, orthologs, allelic variants and functional mutants. Typically, 50% identity or more between two proteins is considered to be an indication of functional equivalence. Identity between proteins is preferably determined by the Smith-Waterman homology search algorithm as implemented in the MPSRCH program (Oxford Molecular), using an affine gap search with parameters gap open penalty=12 and gap extension penalty=1.

[0011] The invention further provides proteins comprising fragments of the S. agalactiae amino acid sequences disclosed in the examples, and proteins comprising fragments of the S. pyogenes amino acid sequences disclosed in the examples (in particular to even SEQ IDs 60-304). The fragments should comprise at least n consecutive amino acids from the sequences and, depending on the particular sequence, n is 7 or more (e.g. 8, 10, 12, 14, 16, 18, 20, 30, 40, 50, 60, 70, 80, 90, 100 or more). Preferably the fragments comprise one or more epitopes from the sequence. Other preferred fragments are (a) the N-terminal signal peptides of the proteins disclosed in the examples, (b) the proteins disclosed in the examples, but without their N-terminal signal peptides, (c) fragments common to related GAS and GBS proteins disclosed in the examples, and (d) the proteins disclosed in the examples, but without their N-terminal amino acid residue.

[0012] Where the protein of the invention is related to one of SEQ IDs 2-58 or 308-346, it preferably includes one or more of the N-terminal amino acid residues which are not in the corresponding GBS (SEQ IDs 2-58) or GAS (SED IDs 308-346) sequences disclosed in WO02/34771 (SEQ IDs 2-58) or by Ferretti et al. (SEQ IDs 308-346).

[0013] Where the protein of the invention is related to SEQ ID 302, it preferably does not include residues 234-377 of GI:15674471.

[0014] Where the protein of the invention is related to SEQ ID 306, it preferably does not include residues 1-138 of GI:13621680.

[0015] The proteins of the invention can, of course, be prepared by various means (e.g. recombinant expression, purification from GAS or GBS, chemical synthesis etc.) and in various forms (e.g. native, fusions, glycosylated, non-glycosylated etc.). They are preferably prepared in substantially pure form (i.e. substantially free from other streptococcal or host cell proteins) or substantially isolated form. Proteins of the invention are preferably streptococcal proteins. They are preferred for use as vaccine antigens.

[0016] According to a further aspect, the invention provides antibodies which bind to these proteins. These may be polyclonal or monoclonal and may be produced by any suitable means (e.g. by recombinant expression). To increase compatibility with the human immune system, the antibodies may be chimeric or humanised (e.g. Breedveld (2000) Lancet 355(9205):735-740; Gorman & Clark (1990) Semin. Immunol. 2:457-466), or fully human antibodies may be used. The antibodies may include a detectable label (e.g. for diagnostic assays).

[0017] According to a further aspect, the invention provides nucleic acid comprising the S. agalactiae nucleotide sequences disclosed in the examples, and nucleic acid comprising the S. pyogenes nucleotide sequences disclosed in the examples. These nucleic acid sequences are the odd-numbered SEQ IDs between 1 and 1371.

[0018] In addition, the invention provides nucleic acid comprising nucleotide sequences having sequence identity to the S. agalactiae nucleotide sequences disclosed in the examples, and nucleic acid comprising nucleotide sequences having sequence identity to the S. pyogenes nucleotide sequences disclosed in the examples (in particular to odd SEQ IDs 59-234). Identity between sequences is preferably determined by the Smith-Waterman homology search algorithm as described above.

[0019] Furthermore, the invention provides nucleic acid which can hybridise to the S. agalactiae nucleic acid disclosed in the examples (in particular to odd SEQ IDs 59-234), and nucleic acid which can hybridise to the S. pyogenes nucleic acid disclosed in the examples preferably under ‘high stringency’ conditions (e.g. 65° C. in 0.1×SSC, 0.5% SDS solution).

[0020] Nucleic acid comprising fragments of these sequences (in particular of odd SEQ IDs 59-234) are also provided. These should comprise at least n consecutive nucleotides from the S. agalactiae or S. pyogenes sequences and, depending on the particular sequence, n is 10 or more (e.g. 12, 14, 15, 18, 20, 25, 30, 35, 40, 50, 60, 70, 80, 90, 100, 150, 200 or more). The fragments may comprise sequences which are common to related GAS and GBS sequences disclosed in the examples.

[0021] According to a further aspect, the invention provides nucleic acid encoding the proteins and protein fragments of the invention.

[0022] The invention also provides: nucleic acid comprising nucleotide sequence SEQ ID 1373; nucleic acid comprising nucleotide sequences having sequence identity to SEQ ID 1373; nucleic acid which can hybridise to SEQ ID 1373 (preferably under ‘high stringency’ conditions); nucleic acid comprising a fragment of at least n consecutive nucleotides from SEQ ID 1373, wherein n is 10 or more e.g. 12, 14, 15, 18, 20, 25, 30, 35, 40, 50, 60, 70, 80, 90, 100, 150, 200, 250, 300, 350, 400, 450, 500, 600, 700, 800, 900, 1000, 1500, 2000, 3000, 4000, 5000, 10000, 100000, 1000000 or more.

[0023] Where the nucleic acid of the invention is related to one of SEQ IDs 1-57 or 307-345, it preferably includes one or more of the 5′ nucleotide residues which are not disclosed in WO02/34771 (SEQ IDs 1-57) or by Ferretti et al. (SEQ IDs 307-345).

[0024] Where the protein of the invention is related to SEQ ID 301, it preferably does not include the nucleotides which encode amino acid residues 234-377 of GI:15674471.

[0025] Where the protein of the invention is related to SEQ ID 305, it preferably does not include the nucleotides which encode amino acid residues 1-138 of GI:13621680.

[0026] Nucleic acids of the invention can be used in hybridisation reactions (e.g. Northern or Southern blots, or in nucleic acid microarrays or ‘gene chips’) and amplification reactions (e.g. PCR, SDA, SSSR, LCR, TMA, NASBA etc.) and other nucleic acid techniques.

[0027] It should also be appreciated that the invention provides nucleic acid comprising sequences complementary to those described above (e.g. for antisense or probing, or for use as primers).

[0028] Nucleic acid according to the invention can, of course, be prepared in many ways (e.g. by chemical synthesis, from genomic or cDNA libraries, from the organism itself etc.) and can take various forms (e.g. single stranded, double stranded, vectors, primers, probes, labelled etc.). The nucleic acid is preferably in substantially isolated form.

[0029] Nucleic acid according to the invention may be labelled e.g. with a radioactive or fluorescent label. This is particularly useful where the nucleic acid is to be used in nucleic acid detection techniques e.g. where the nucleic acid is a primer or as a probe for use in techniques such as PCR, LCR, TMA, NASBA, etc.

[0030] In addition, the term “nucleic acid” includes DNA and RNA, and also their analogues, such as those containing modified backbones, and also peptide nucleic acids (PNA), etc.

[0031] According to a further aspect, the invention provides vectors comprising nucleotide sequences of the invention (e.g. cloning or expression vectors) and host cells transformed with such vectors.

[0032] According to a further aspect, the invention provides compositions comprising protein, antibody, and/or nucleic acid according to the invention. These compositions may be suitable as immunogenic compositions, for instance, or as diagnostic reagents, or as vaccines.

[0033] The invention also provides nucleic acid, protein, or antibody according to the invention for use as medicaments (e.g. as immunogenic compositions or as vaccines) or as diagnostic reagents. It also provides the use of nucleic acid, protein, or antibody according to the invention in the manufacture of: (i) a medicament for treating or preventing disease and/or infection caused by streptococcus; (ii) a diagnostic reagent for detecting the presence of streptococcus or of antibodies raised against streptococcus; and/or (iii) a reagent which can raise antibodies against streptococcus. Said streptococcus may be any species, group or strain, but is preferably S. agalactiae, especially serotype III or V, or S. pyogenes. Said disease may be bacteremia, meningitis, puerperal fever, scarlet fever, erysipelas, pharyngitis, impetigo, necrotising fasciitis, myositis or toxic shock syndrome.

[0034] The invention also provides a method of treating a patient, comprising administering to the patient a therapeutically effective amount of nucleic acid, protein, and/or antibody of the invention. The patient may either be at risk from the disease themselves or may be a pregnant woman (‘maternal immunisation’ e.g. Glezen & Alpers (1999) Clin. Infect. Dis. 28:219-224).

[0035] Administration of protein antigens is a preferred method of treatment for inducing immunity.

[0036] Administration of antibodies of the invention is another preferred method of treatment. This method of passive immunisation is particularly useful for newborn children or for pregnant women. This method will typically use monoclonal antibodies, which will be humanised or fully human.

[0037] The invention also provides a kit comprising primers (e.g. PCR primers) for amplifying a template sequence contained within a Streptococcus (e.g. S. pyogenes or S. agalactiae) nucleic acid sequence, the kit comprising a first primer and a second primer, wherein the first primer is substantially complementary to said template sequence and the second primer is substantially complementary to a complement of said template sequence, wherein the parts of said primers which have substantial complementarity define the termini of the template sequence to be amplified. The first primer and/or the second primer may include a detectable label (e.g. a fluorescent label).

[0038] The invention also provides a kit comprising first and second single-stranded oligonucleotides which allow amplification of a Streptococcus template nucleic acid sequence contained in a single- or double-stranded nucleic acid (or mixture thereof), wherein: (a) the first oligonucleotide comprises a primer sequence which is substantially complementary to said template nucleic acid sequence; (b) the second oligonucleotide comprises a primer sequence which is substantially complementary to the complement of said template nucleic acid sequence; (c) the first oligonucleotide and/or the second oligonucleotide comprise(s) sequence which is not compementary to said template nucleic acid; and (d) said primer sequences define the termini of the template sequence to be amplified. The non-complementary sequence(s) of feature (c) are preferably upstream of (i.e. 5′ to) the primer sequences. One or both of these (c) sequences may comprise a restriction site (e.g. EP-B-0509612) or a promoter sequence (e.g. EP-B-0505012). The first oligonucleotide and/or the second oligonucleotide may include a detectable label (e.g. a fluorescent label).

[0039] The template sequence may be any part of a genome sequence (e.g. SEQ ID 1373). For example, it could be a rRNA gene (e.g. Turenne et al. (2000) J. Clin. Microbiol. 38:513-520) or a protein-coding gene. The template sequence is preferably specific to GBS.

[0040] The invention also provides a computer-readable medium (e.g. a floppy disk, a hard disk, a CD-ROM, a DVD etc.) and/or a computer database containing one or more of the sequences in the sequence listing. The medium preferably contains SEQ ID 1373.

[0041] The invention also provides a hybrid protein represented by the formula NH₂-A-[-X-L-]ₙ-B—COOH, wherein X is a protein of the invention, L is an optional linker amino acid sequence, A is an optional N-terminal amino acid sequence, B is an optional C-terminal amino acid sequence, and n is an integer greater than 1. The value of n is between 2 and x, and the value of x is typically 3, 4, 5, 6, 7, 8, 9 or 10. Preferably n is 2, 3 or 4; it is more preferably 2 or 3; most preferably, n=2. For each n instances, —X— may be the same or different. For each n instances of [—X-L-], linker amino acid sequence -L- may be present or absent. For instance, when n=2 the hybrid may be NH₂—X₁-L₁-X₂-L₂-COOH, NH₂—X₁—X₂—COOH, NH₂—X₁-L₁-X₂—COOH, NH₂—X₁—X₂-L₂-COOH, etc. Linker amino acid sequence(s) -L- will typically be short (e.g. 20 or fewer amino acids i.e. 19, 18, 17, 16, 15, 14, 13, 12, 11, 10, 9, 8, 7, 6, 5, 4, 3, 2, 1). Examples include short peptide sequences which facilitate cloning, poly-glycine linkers (i.e. Glyₙ where n=2, 3, 4, 5, 6, 7, 8, 9, 10 or more), and histidine tags (i.e. Hisₙ where n=3, 4, 5, 6, 7, 8, 9, 10 or more). Other suitable linker amino acid sequences will be apparent to those skilled in the art. -A- and —B— are optional sequences which will typically be short (e.g. 40 or fewer amino acids i.e. 39, 38, 37, 36, 35, 34, 33, 32, 31, 30, 29, 28, 27, 26, 25, 24, 23, 22, 21, 20, 19, 18, 17, 16, 15, 14, 13, 12, 11, 10, 9, 8, 7, 6, 5, 4, 3, 2, 1). Examples include leader sequences to direct protein trafficking, or short peptide sequences which facilitate cloning or purification (e.g. histidine tags i.e. His, where n=3, 4, 5, 6, 7, 8, 9, 10 or more). Other suitable N-terminal and C-terminal amino acid sequences will be apparent to those skilled in the art. In some embodiments, each X will be a GBS sequence; in others, mixtures of GAS and GBS will be used.

[0042] According to further aspects, the invention provides various processes.

[0043] A process for producing proteins of the invention is provided, comprising the step of culturing a host cell of to the invention under conditions which induce protein expression.

[0044] A process for producing protein or nucleic acid of the invention is provided, wherein the protein or nucleic acid is synthesised in part or in whole using chemical means.

[0045] A process for detecting polynucleotides of the invention is provided, comprising the steps of: (a) contacting a nucleic probe according to the invention with a biological sample under hybridising conditions to form duplexes; and (b) detecting said duplexes.

[0046] A process for detecting Streptococcus in a biological sample (e.g. blood) is also provided, comprising the step of contacting nucleic acid according to the invention with the biological sample under hybridising conditions. The process may involve nucleic acid amplification (e.g. PCR, SDA, SSSR, LCR, TMA, NASBA etc.) or hybridisation (e.g. microarrays, blots, hybridisation with a probe in solution etc.). PCR detection of Streptococcus in clinical samples, in particular S. pyogenes, has been reported [see e.g. Louie et al. (2000) CMAJ 163:301-309; Louie et al. (1998) J. Clin. Microbiol. 36:1769-1771]. Clinical assays based on nucleic acid are described in general in Tang et al. (1997) Clin. Chem. 43:2021-2038.

[0047] A process for detecting proteins of the invention is provided, comprising the steps of: (a) contacting an antibody of the invention with a biological sample under conditions suitable for the formation of an antibody-antigen complexes; and (b) detecting said complexes.

[0048] A process for identifying an amino acid sequence is provided, comprising the step of searching for putative open reading frames or protein-coding regions within a genome sequence of S. agalactiae. This will typically involve in silico searching the sequence for an initiation codon and for an in-frame termination codon in the downstream sequence. The region between these initiation and termination codons is a putative protein-coding sequence. Typically, all six possible reading frames will be searched. Suitable software for such analysis includes ORFFINDER (NCBI), GENEMARK [Borodovsky & McIninch (1993) Computers Chem. 17:122-133), GLIMMER [Salzberg et al. (1998) Nucleic Acids Res. 26:544-548; Salzberg et al. (1999) Genomics 59:24-31; Delcher et al. (1999) Nucleic Acids Res. 27:4636-4641], or other software which uses Markov models [e.g. Shmatkov et al. (1999) Bioinformatics 15:874-876]. The invention also provides a protein comprising the identified amino acid sequence. These proteins can then expressed using conventional techniques.

[0049] The invention also provides a process for determining whether a test compound binds to a protein of the invention. If a test compound binds to a protein of the invention and this binding inhibits the life cycle of the GBS bacterium, then the test compound can be used as an antibiotic or as a lead compound for the design of antibiotics. The process will typically comprise the steps of contacting a test compound with a protein of the invention, and determining whether the test compound binds to said protein. Preferred proteins of the invention for use in these processes are enzymes (e.g. tRNA synthetases), membrane transporters and ribosomal proteins. Suitable test compounds include proteins, polypeptides, carbohydrates, lipids, nucleic acids (e.g. DNA, RNA, and modified forms thereof), as well as small organic compounds (e.g. MW between 200 and 2000 Da). The test compounds may be provided individually, but will typically be part of a library (e.g. a combinatorial library). Methods for detecting a binding interaction include NMR, filter-binding assays, gel-retardation assays, displacement assays, surface plasmon resonance, reverse two-hybrid etc. A compound which binds to a protein of the invention can be tested for antibiotic activity by contacting the compound with GBS bacteria and then monitoring for inhibition of growth. The invention also provides a compound identified using these methods.

[0050] The invention also provides a composition comprising a protein or the invention and one or more of the following antigens:
[0051] a protein antigen from Helicobacter pylori such as VacA, CagA, NAP, HopX, HopY [e.g. WO98/04702] and/or urease.
[0052] a protein antigen from N. meningitidis serogroup B, such as those in WO99/24578, WO99/36544, WO99/57280, WO00/22430, Tettelin et al. (2000) Science 287:1809-1815, Pizza et al. (2000) Science 287:1816-1820 and WO96/29412, with protein ‘287’ and derivatives being particularly preferred.
[0053] an outer-membrane vesicle (OMV) preparation from N. meningitidis serogroup B, such as those disclosed in WO01/52885; Bjune et al. (1991) Lancet 338(8775):1093-1096; Fukasawa et al. (1999) Vaccine 17:2951-2958; Rosenqvist et al. (1998) Dev. Biol. Stand. 92:323-333 etc.
[0054] a saccharide antigen from N. meningitidis serogroup A, C, W135 and/or Y, such as the oligosaccharide disclosed in Costantino et al. (1992) Vaccine 10:691-698 from serogroup C [see also Costantino et al. (1999) Vaccine 17:1251-1263].

[0055] a saccharide antigen from Streptococcus pneumoniae [e.g. Watson (2000) Pediatr Infect Dis J 19:331-332; Rubin (2000) Pediatr Clin North Am 47:269-285, v; Jedrzejas (2001) Microbiol Mol Biol Rev 65:187-207].
[0056] an antigen from hepatitis A virus, such as inactivated virus [e.g. Bell (2000) Pediatr Infect Dis J 19:1187-1188; Iwarson (1995) APMIS 103:321-326].
[0057] an antigen from hepatitis B virus, such as the surface and/or core antigens [e.g. Gerlich et al. (1990) Vaccine 8 Suppl:S63-68 & 79-80].
[0058] an antigen from hepatitis C virus [e.g. Hsu et al. (1999) Clin Liver Dis 3:901-915].
[0059] an antigen from Bordetella pertussis, such as pertussis holotoxin (PT) and filamentous haemagglutinin (FHA) from B. pertussis, optionally also in combination with pertactin and/or agglutinogens 2 and 3 [e.g. Gustafsson et al. (1996) N. Engl. J. Med. 334:349-355; Rappuoli et al. (1991) TIBTECH 9:232-238].
[0060] a diphtheria antigen, such as a diphtheria toxoid [e.g. chapter 3 of Vaccines (1988) eds. Plotkin & Mortimer. ISBN 0-7216-1946-0] e.g. the CRM₁₉₇ mutant [e.g. Del Guidice et al. (1998) Molecular Aspects of Medicine 19:1-70].
[0061] a tetanus antigen, such as a tetanus toxoid [e.g. chapter 4 of Plotkin & Mortimer].
[0062] a saccharide antigen from Haemophilus influenzae B.
[0063] an antigen from N. gonorrhoeae [e.g. WO99/24578, WO99/36544, WO99/57280].
[0064] an antigen from Chlamydia pneumoniae [e.g. WO02/02606; Kalman et al. (1999) Nature Genetics 21:385-389; Read et al. (2000) Nucleic Acids Res 28:1397-406; Shirai et al. (2000) J. Infect. Dis. 181(Suppl 3):S524-S527; WO99/27105; WO00/27994; WO00/37494].
[0065] an antigen from Chlamydia trachomatis [e.g. WO99/28475].
[0066] an antigen from Porphyromonas gingivalis [e.g. Ross et al. (2001) Vaccine 19:4135-4142].
[0067] polio antigen(s) [e.g. Sutter et al. (2000) Pediatr Clin North Am 47:287-308; Zimmerman & Spann (1999) Am Fam Physician 59:113-118, 125-126] such as IPV or OPV.
[0068] rabies antigen(s) [e.g. Dreesen (1997) Vaccine 15 Suppl:S2-6] such as lyophilised inactivated virus [e.g. MMWR Morb Mortal Wkly Rep 1998 Jan. 16; 47(1):12, 19; RabAvert™].
[0069] measles, mumps and/or rubella antigens [e.g. chapters 9, 10 & 11 of Plotkin & Mortimer].
[0070] influenza antigen(s) [e.g. chapter 19 of Plotkin & Mortimer], such as the haemagglutinin and/or neuraminidase surface proteins.
[0071] an antigen from Moraxella catarrhalis [e.g. McMichael (2000) Vaccine 19 Suppl 1:S101-107].
[0072] an antigen from Staphylococcus aureus [e.g. Kuroda et al. (2001) Lancet 357(9264):1225-1240; see also pages 1218-1219].
[0073] an antigen disclosed in international patent application WO02/34771.
[0074] antigen(s) from a paramyxovirus such as respiratory syncytial virus (RSV e.g. Anderson (2000) Vaccine 19 Suppl 1:S59-65; Kahn (2000) Curr Opin Pedaitr 12:257-262) and/or parainfluenza virus (PIV3 e.g. Crowe (1995) Vaccine 13:415-421.).
[0075] an antigen from Bacillus anthracis [e.g. Demicheli et al. (1998) Vaccine 16:880-884; Stepanov et al. (1996) J Biotechnol 44:155-160; J Toxicol Clin Toxicol (2001) 39:85-100].
[0076] an antigen from a virus in the flaviviridae family (genus flavivirus), such as from yellow fever virus, Japanese encephalitis virus, four serotypes of Dengue viruses, tick-borne encephalitis virus, West Nile virus.
[0077] a pestivirus antigen, such as from classical porcine fever virus, bovine viral diarrhoea virus, and/or border disease virus.
[0078] a parvovirus antigen e.g. from parvovirus B19.

[0079] Where a saccharide or carbohydrate antigen is included, it is preferably conjugated to a carrier protein in order to enhance immunogenicity [e.g. Ramsay et al. (2001) Lancet 357(9251):195-196; Lindberg (1999) Vaccine 17 Suppl 2:S28-36; Conjugate Vaccines (eds. Cruse et al.) ISBN 3805549326, particularly vol. 10:48-114 etc.]. Preferred carrier proteins are bacterial toxins or toxoids, such as diphtheria or tetanus toxoids. The CRM₁₉₇ diphtheria toxoid is particularly preferred. Other suitable carrier proteins include the N. meningitidis outer membrane protein [e.g. EP-0372501], synthetic peptides [e.g. EP-0378881, EP-0427347], heat shock proteins [e.g. WO93/17712], pertussis proteins [e.g. WO98/58668; EP-0471177], protein D from H. influenzae [e.g. WO00/56360), toxin A or B from C. difficile [e.g. WO00/61761], etc. Any suitable conjugation reaction can be used, with any suitable linker where necessary.

[0080] Toxic protein antigens may be detoxified where necessary (e.g. detoxification of pertussis toxin by chemical and/or genetic means).

[0081] Where a diphtheria antigen is included in the composition it is preferred also to include tetanus antigen and pertussis antigens. Similarly, where a tetanus antigen is included it is preferred also to include diphtheria and pertussis antigens. Similarly, where a pertussis antigen is included it is preferred also to include diphtheria and tetanus antigens.

[0082] Antigens are preferably adsorbed to an aluminium salt.

[0083] Antigens in the composition will typically be present at a concentration of at least 1 μg/ml each. In general, the concentration of any given antigen will be sufficient to elicit an immune response against that antigen.

[0084] The invention also provides compositions comprising two or more proteins of the present invention. The two or more proteins may comprise GBS sequences or may comprise GAS and GBS sequences. The composition can include fewer than 15 proteins of the invention (e.g. 14, 13, 12, 11, 10, 9, 8, 7, 6, 5, 4).

[0085] It is preferred that the disclosure of WO02/34771 (SEQ IDs 1 to 10967) is excluded from the scope of the present invention.

[0086] A summary of standard techniques and procedures which may be employed to perform the invention (e.g. to utilise the disclosed sequences for vaccination or diagnostic purposes) follows. This summary is not a limitation on the invention but, rather, gives examples that may be used, but are not required.

General

[0087] The practice of the present invention will employ, unless otherwise indicated, conventional techniques of molecular biology, microbiology, recombinant DNA, and immunology, which are within the skill of the art. Such techniques are explained fully in the literature eg. Sambrook Molecular Cloning; A Laboratory Manual, Second Edition (1989); DNA Cloning, Volumes I and II (D. N Glover ed. 1985); Oligonucleotide Synthesis (M. J. Gait ed, 1984); Nucleic Acid Hybridization (B. D. Hames & S. J. Higgins eds. 1984); Transcription and Translation (B. D. Hames & S. J. Higgins eds. 1984); Animal Cell Culture (R. I. Freshney ed. 1986); Immobilized Cells and Enzymes (IRL Press, 1986); B. Perbal, A Practical Guide to Molecular Cloning (1984); the Methods in Enzymology series (Academic Press, Inc.), especially volumes 154 & 155; Gene Transfer Vectors for Mammalian Cells (J. H. Miller and M. P. Calos eds. 1987, Cold Spring Harbor Laboratory); Mayer and Walker, eds. (1987), Immunochemical Methods in Cell and Molecular Biology (Academic Press, London); Scopes, (1987) Protein Purification: Principles and Practice, Second Edition (Springer-Verlag, N.Y.), and Handbook of Experimental Immunology, Volumes I-IV (D. M. Weir and C. C. Blackwell eds 1986).

[0088] Standard abbreviations for nucleotides and amino acids are used in this specification.

Definitions

[0089] A composition containing X is “substantially free of” Y when at least 85% by weight of the total X+Y in the composition is X. Preferably, X comprises at least about 90% by weight of the total of X+Y in the composition, more preferably at least about 95% or even 99% by weight.

[0090] The term “comprising” means “including” as well as “consisting” e.g. a composition “comprising” X may consist exclusively of X or may include something additional e.g. X+Y.

[0091] The term “heterologous” refers to two biological components that are not found together in nature. The components may be host cells, genes, or regulatory regions, such as promoters. Although the heterologous components are not found together in nature, they can function together, as when a promoter heterologous to a gene is operably linked to the gene. Another example is where a streptococcus sequence is heterologous to a mouse host cell. A further examples would be two epitopes from the same or different proteins which have been assembled in a single protein in an arrangement not found in nature.

[0092] An “origin of replication” is a polynucleotide sequence that initiates and regulates replication of polynucleotides, such as an expression vector. The origin of replication behaves as an autonomous unit of polynucleotide replication within a cell, capable of replication under its own control. An origin of replication may be needed for a vector to replicate in a particular host cell. With certain origins of replication, an expression vector can be reproduced at a high copy number in the presence of the appropriate proteins within the cell. Examples of origins are the autonomously replicating sequences, which are effective in yeast; and the viral T-antigen, effective in COS-7 cells.

[0093] A “mutant” sequence is defined as DNA, RNA or amino acid sequence differing from but having sequence identity with the native or disclosed sequence. Depending on the particular sequence, the degree of sequence identity between the native or disclosed sequence and the mutant sequence is preferably greater than 50% (eg. 60%, 70%, 80%, 90%, 95%, 99% or more, calculated using the Smith-Waterman algorithm as described above). As used herein, an “allelic variant” of a nucleic acid molecule, or region, for which nucleic acid sequence is provided herein is a nucleic acid molecule, or region, that occurs essentially at the same locus in the genome of another or second isolate, and that, due to natural variation caused by, for example, mutation or recombination, has a similar but not identical nucleic acid sequence. A coding region allelic variant typically encodes a protein having similar activity to that of the protein encoded by the gene to which it is being compared. An allelic variant can also comprise an alteration in the 5′ or 3′ untranslated regions of the gene, such as in regulatory control regions (eg. see U.S. Pat. No. 5,753,235).

Expression Systems

[0094] The streptococcus nucleotide sequences can be expressed in a variety of different expression systems; for example those used with mammalian cells, baculoviruses, plants, bacteria, and yeast.

i. Mammalian Systems

[0095] Mammalian expression systems are known in the art. A mammalian promoter is any DNA sequence capable of binding mammalian RNA polymerase and initiating the downstream (3′) transcription of a coding sequence (eg. structural gene) into mRNA. A promoter will have a transcription initiating region, which is usually placed proximal to the 5′ end of the coding sequence, and a TATA box, usually located 25-30 base pairs (bp) upstream of the transcription initiation site. The TATA box is thought to direct RNA polymerase II to begin RNA synthesis at the correct site. A mammalian promoter will also contain an upstream promoter element, usually located within 100 to 200 bp upstream of the TATA box. An upstream promoter element determines the rate at which transcription is initiated and can act in either orientation [Sambrook et al. (1989) “Expression of Cloned Genes in Mammalian Cells.” In Molecular Cloning: A Laboratory Manual, 2nd ed.].

[0096] Mammalian viral genes are often highly expressed and have a broad host range; therefore sequences encoding mammalian viral genes provide particularly useful promoter sequences. Examples include the SV40 early promoter, mouse mammary tumor virus LTR promoter, adenovirus major late promoter (Ad MLP), and herpes simplex virus promoter. In addition, sequences derived from non-viral genes, such as the murine metallotheionein gene, also provide useful promoter sequences. Expression may be either constitutive or regulated (inducible), depending on the promoter can be induced with glucocorticoid in hormone-responsive cells.

[0097] The presence of an enhancer element (enhancer), combined with the promoter elements described above, will usually increase expression levels. An enhancer is a regulatory DNA sequence that can stimulate transcription up to 1000-fold when linked to homologous or heterologous promoters, with synthesis beginning at the normal RNA start site. Enhancers are also active when they are placed upstream or downstream from the transcription initiation site, in either normal or flipped orientation, or at a distance of more than 1000 nucleotides from the promoter [Maniatis et al. (1987) Science 236:1237; Alberts et al. (1989) Molecular Biology of the Cell, 2nd ed.]. Enhancer elements derived from viruses may be particularly useful, because they usually have a broader host range. Examples include the SV40 early gene enhancer [Dijkema et al (1985) EMBO J. 4:761] and the enhancer/promoters derived from the long terminal repeat (LTR) of the Rous Sarcoma Virus [Gorman et al. (1982b) Proc. Natl. Acad. Sci. 79:6777] and from human cytomegalovirus [Boshart et al. (1985) Cell 41:521]. Additionally, some enhancers are regulatable and become active only in the presence of an inducer, such as a hormone or metal ion [Sassone-Corsi and Borelli (1986) Trends Genet. 2:215; Maniatis et al. (1987) Science 236:1237].

[0098] A DNA molecule may be expressed intracellularly in mammalian cells. A promoter sequence may be directly linked with the DNA molecule, in which case the first amino acid at the N-terminus of the recombinant protein will always be a methionine, which is encoded by the ATG start codon. If desired, the N-terminus may be cleaved from the protein by in vitro incubation with cyanogen bromide.

[0099] Alternatively, foreign proteins can also be secreted from the cell into the growth media by creating chimeric DNA molecules that encode a fusion protein comprised of a leader sequence fragment that provides for secretion of the foreign protein in mammalian cells. Preferably, there are processing sites encoded between the leader fragment and the foreign gene that can be cleaved either in vivo or in vitro. The leader sequence fragment usually encodes a signal peptide comprised of hydrophobic amino acids which direct the secretion of the protein from the cell. The adenovirus triparite leader is an example of a leader sequence that provides for secretion of a foreign protein in mammalian cells.

[0100] Usually, transcription termination and polyadenylation sequences recognized by mammalian cells are regulatory regions located 3′ to the translation stop codon and thus, together with the promoter elements, flank the coding sequence. The 3′ terminus of the mature mRNA is formed by site-specific post-transcriptional cleavage and polyadenylation [Bimstiel et al. (1985) Cell 41:349; Proudfoot and Whitelaw (1988) “Termination and 3′ end processing of eukaryotic RNA. In Transcription and splicing (ed. B. D. Hames and D. M. Glover); Proudfoot (1989) Trends Biochem. Sci. 14:105]. These sequences direct the transcription of an mRNA which can be translated into the polypeptide encoded by the DNA. Examples of transcription terminater/polyadenylation signals include those derived from SV40 [Sambrook et al (1989) “Expression of cloned genes in cultured mammalian cells.” In Molecular Cloning: A Laboratory Manual].

[0101] Usually, the above described components, comprising a promoter, polyadenylation signal, and transcription termination sequence are put together into expression constructs. Enhancers, introns with functional splice donor and acceptor sites, and leader sequences may also be included in an expression construct, if desired. Expression constructs are often maintained in a replicon, such as an extrachromosomal element (eg. plasmids) capable of stable maintenance in a host, such as mammalian cells or bacteria. Mammalian replication systems include those derived from animal viruses, which require trans-acting factors to replicate. For example, plasmids containing the replication systems of papovaviruses, such as SV40 [Gluzman (1981) Cell 23:175] or polyomavirus, replicate to extremely high copy number in the presence of the appropriate viral T antigen. Additional examples of mammalian replicons include those derived from bovine papillomavirus and Epstein-Barr virus. Additionally, the replicon may have two replicaton systems, thus allowing it to be maintained, for example, in mammalian cells for expression and in a prokaryotic host for cloning and amplification. Examples of such mammalian-bacteria shuttle vectors include pMT2 [Kaufman et al. (1989) Mol. Cell. Biol. 9:946] and pHEBO [Shimizu et al. (1986) Mol. Cell. Biol. 6:1074].

[0102] The transformation procedure used depends upon the host to be transformed. Methods for introduction of heterologous polynucleotides into mammalian cells are known in the art and include dextran-mediated transfection, calcium phosphate precipitation, polybrene mediated transfection, protoplast fusion, electroporation, encapsulation of the polynucleotide(s) in liposomes, and direct microinjection of the DNA into nuclei.

[0103] Mammalian cell lines available as hosts for expression are known in the art and include many immortalized cell lines available from the American Type Culture Collection (ATCC), including but not limited to, Chinese hamster ovary (CHO) cells, HeLa cells, baby hamster kidney (BHK) cells, monkey kidney cells (COS), human hepatocellular carcinoma cells (eg. Hep G2), and a number of other cell lines.

ii. Baculovirus Systems

[0104] The polynucleotide encoding the protein can also be inserted into a suitable insect expression vector, and is operably linked to the control elements within that vector. Vector construction employs techniques which are known in the art. Generally, the components of the expression system include a transfer vector, usually a bacterial plasmid, which contains both a fragment of the baculovirus genome, and a convenient restriction site for insertion of the heterologous gene or genes to be expressed; a wild type baculovirus with a sequence homologous to the baculovirus-specific fragment in the transfer vector (this allows for the homologous recombination of the heterologous gene in to the baculovirus genome); and appropriate insect host cells and growth media.

[0105] After inserting the DNA sequence encoding the protein into the transfer vector, the vector and the wild type viral genome are transfected into an insect host cell where the vector and viral genome are allowed to recombine. The packaged recombinant virus is expressed and recombinant plaques are identified and purified. Materials and methods for baculovirus/insect cell expression systems are commercially available in kit form from, inter alia, Invitrogen, San Diego Calif. (“MaxBac” kit). These techniques are generally known to those skilled in the art and fully described in Summers and Smith, Texas Agricultural Experiment Station Bulletin No. 1555 (1987) (hereinafter “Summers and Smith”).

[0106] Prior to inserting the DNA sequence encoding the protein into the baculovirus genome, the above described components, comprising a promoter, leader (if desired), coding sequence, and transcription termination sequence, are usually assembled into an intermediate transplacement construct (transfer vector). This may contain a single gene and operably linked regulatory elements; multiple genes, each with its owned set of operably linked regulatory elements; or multiple genes, regulated by the same set of regulatory elements. Intermediate transplacement constructs are often maintained in a replicon, such as an extra-chromosomal element (e.g. plasmids) capable of stable maintenance in a host, such as a bacterium. The replicon will have a replication system, thus allowing it to be maintained in a suitable host for cloning and amplification.

[0107] Currently, the most commonly used transfer vector for introducing foreign genes into AcNPV is pAc373. Many other vectors, known to those of skill in the art, have also been designed. These include, for example, pVL985 (which alters the polyhedrin start codon from ATG to ATT, and which introduces a BamHI cloning site 32 basepairs downstream from the ATT; see Luckow and Summers, Virology (1989) 17:31.

[0108] The plasmid usually also contains the polyhedrin polyadenylation signal (Miller et al. (1988) Ann. Rev. Microbiol., 42:177) and a prokaryotic ampicillin-resistance (amp) gene and origin of replication for selection and propagation in E. coli.

[0109] Baculovirus transfer vectors usually contain a baculovirus promoter. A baculovirus promoter is any DNA sequence capable of binding a baculovirus RNA polymerase and initiating the downstream (5′ to 3′) transcription of a coding sequence (eg. structural gene) into mRNA. A promoter will have a transcription initiation region which is usually placed proximal to the 5′ end of the coding sequence. This transcription initiation region usually includes an RNA polymerase binding site and a transcription initiation site. A baculovirus transfer vector may also have a second domain called an enhancer, which, if present, is usually distal to the structural gene. Expression may be either regulated or constitutive.

[0110] Structural genes, abundantly transcribed at late times in a viral infection cycle, provide particularly useful promoter sequences. Examples include sequences derived from the gene encoding the viral polyhedron protein, Friesen et al., (1986) “The Regulation of Baculovirus Gene Expression,” in: The Molecular Biology of Baculoviruses (ed. Walter Doerfler); EPO Publ. Nos. 127 839 and 155 476; and the gene encoding the p10 protein, Vlak et al., (1988), J. Gen. Virol 69:765.

[0111] DNA encoding suitable signal sequences can be derived from genes for secreted insect or baculovirus proteins, such as the baculovirus polyhedrin gene (Carbonell et al. (1988) Gene, 73:409). Alternatively, since the signals for mammalian cell posttranslational modifications (such as signal peptide cleavage, proteolytic cleavage, and phosphorylation) appear to be recognized by insect cells, and the signals required for secretion and nuclear accumulation also appear to be conserved between the invertebrate cells and vertebrate cells, leaders of non-insect origin, such as those derived from genes encoding human α-interferon, Maeda et al., (1985), Nature 315:592; human gastrin-releasing peptide, Lebacq-Verheyden et al., (1988), Molec. Cell Biol. 8:3129; human IL-2, Smith et al., (1985) Proc. Nat'l Acad. Sci. USA, 82:8404; mouse IL-3, (Miyajima et al., (1987) Gene 58:273; and human glucocerebrosidase, Martin et al. (1988) DNA, 7:99, can also be used to provide for secretion in insects.

[0112] A recombinant polypeptide or polyprotein may be expressed intracellularly or, if it is expressed with the proper regulatory sequences, it can be secreted. Good intracellular expression of nonfused foreign proteins usually requires heterologous genes that ideally have a short leader sequence containing suitable translation initiation signals preceding an ATG start signal. If desired, methionine at the N-terminus may be cleaved from the mature protein by in vitro incubation with cyanogen bromide.

[0113] Alternatively, recombinant polyproteins or proteins which are not naturally secreted can be secreted from the insect cell by creating chimeric DNA molecules that encode a fusion protein comprised of a leader sequence fragment that provides for secretion of the foreign protein in insects. The leader sequence fragment usually encodes a signal peptide comprised of hydrophobic amino acids which direct the translocation of the protein into the endoplasmic reticulum.

[0114] After insertion of the DNA sequence and/or the gene encoding the expression product precursor of the protein, an insect cell host is co-transformed with the heterologous DNA of the transfer vector and the genomic DNA of wild type baculovirus—usually by co-transfection. The promoter and transcription termination sequence of the construct will usually comprise a 2-5 kb section of the baculovirus genome. Methods for introducing heterologous DNA into the desired site in the baculovirus virus are known in the art. (See Summers and Smith supra; Ju et al. (1987); Smith et al., Mol. Cell. Biol. (1983) 3:2156; and Luckow and Summers (1989)). For example, the insertion can be into a gene such as the polyhedrin gene, by homologous double crossover recombination; insertion can also be into a restriction enzyme site engineered into the desired baculovirus gene. Miller et al., (1989), Bioessays 4:91. The DNA sequence, when cloned in place of the polyhedrin gene in the expression vector, is flanked both 5′ and 3′ by polyhedrin-specific sequences and is positioned downstream of the polyhedrin promoter.

[0115] The newly formed baculovirus expression vector is subsequently packaged into an infectious recombinant baculovirus. Homologous recombination occurs at low frequency (between about 1% and about 5%); thus, the majority of the virus produced after cotransfection is still wild-type virus. Therefore, a method is necessary to identify recombinant viruses. An advantage of the expression system is a visual screen allowing recombinant viruses to be distinguished. The polyhedrin protein, which is produced by the native virus, is produced at very high levels in the nuclei of infected cells at late times after viral infection. Accumulated polyhedrin protein forms occlusion bodies that also contain embedded particles. These occlusion bodies, up to 15 μm in size, are highly refractile, giving them a bright shiny appearance that is readily visualized under the light microscope. Cells infected with recombinant viruses lack occlusion bodies. To distinguish recombinant virus from wild-type virus, the transfection supernatant is plaqued onto a monolayer of insect cells by techniques known to those skilled in the art. Namely, the plaques are screened under the light microscope for the presence (indicative of wild-type virus) or absence (indicative of recombinant virus) of occlusion bodies. “Current Protocols in Microbiology” Vol. 2 (Ausubel et al. eds) at 16.8 (Supp. 10, 1990); Summers and Smith, supra; Miller et al. (1989).

[0116] Recombinant baculovirus expression vectors have been developed for infection into several insect cells. For example, recombinant baculoviruses have been developed for, inter alia: Aedes aegypti, Autographa californica, Bombyx mori, Drosophila melanogaster, Spodoptera frugiperda, and Trichoplusia ni (WO 89/046699; Carbonell et al., (1985) J. Virol. 56:153; Wright (1986) Nature 321:718; Smith et al., (1983) Mol. Cell. Biol. 3:2156; and see generally, Fraser, et al. (1989) In Vitro Cell. Dev. Biol. 25:225).

[0117] Cells and cell culture media are commercially available for both direct and fusion expression of heterologous polypeptides in a baculovirus/expression system; cell culture technology is generally known to those skilled in the art. See, eg. Summers and Smith supra.

[0118] The modified insect cells may then be grown in an appropriate nutrient medium, which allows for stable maintenance of the plasmid(s) present in the modified insect host. Where the expression product gene is under inducible control, the host may be grown to high density, and expression induced. Alternatively, where expression is constitutive, the product will be continuously expressed into the medium and the nutrient medium must be continuously circulated, while removing the product of interest and augmenting depleted nutrients. The product may be purified by such techniques as chromatography, eg. HPLC, affinity chromatography, ion exchange chromatography, etc.; electrophoresis; density gradient centrifugation; solvent extraction, etc. As appropriate, the product may be further purified, as required, so as to remove substantially any insect proteins which are also present in the medium, so as to provide a product which is at least substantially free of host debris, eg. proteins, lipids and polysaccharides.

[0119] In order to obtain protein expression, recombinant host cells derived from the transformants are incubated under conditions which allow expression of the recombinant protein encoding sequence. These conditions will vary, dependent upon the host cell selected. However, the conditions are readily ascertainable to those of ordinary skill in the art, based upon what is known in the art.

iii. Plant Systems

[0120] There are many plant cell culture and whole plant genetic expression systems known in the art. Exemplary plant cellular genetic expression systems include those described in patents, such as: U.S. Pat. No. 5,693,506; U.S. Pat. No. 5,659,122; and U.S. Pat. No. 5,608,143. Additional examples of genetic expression in plant cell culture has been described by Zenk, Phytochemistry 30:3861-3863 (1991). Descriptions of plant protein signal peptides may be found in addition to the references described above in Vaulcombe et al., Mol. Gen. Genet. 209:3340 (1987); Chandler et al., Plant Molecular Biology 3:407-418 (1984); Rogers, J. Biol. Chem. 260:3731-3738 (1985); Rothstein et al., Gene 55:353-356 (1987); Whittier et al., Nucleic Acids Research 15:2515-2535 (1987); Wirsel et al., Molecular Microbiology 3:3-14 (1989); Yu et al., Gene 122:247-253 (1992). A description of the regulation of plant gene expression by the phytohormone, gibberellic acid and secreted enzymes induced by gibberellic acid can be found in R. L. Jones and J. MacMillin, Gibberellins: in: Advanced Plant Physiology, Malcolm B. Wilkins, ed., 1984 Pitman Publishing Limited, London, pp. 21-52. References that describe other metabolically-regulated genes: Sheen, Plant Cell, 2:1027-1038 (1990); Maas et al., EMBO J. 9:3447-3452 (1990); Benkel and Hickey, Proc. Natl. Acad. Sci. 84:1337-1339 (1987).

[0121] Typically, using techniques known in the art, a desired polynucleotide sequence is inserted into an expression cassette comprising genetic regulatory elements designed for operation in plants. The expression cassette is inserted into a desired expression vector with companion sequences upstream and downstream from the expression cassette suitable for expression in a plant host. The companion sequences will be of plasmid or viral origin and provide necessary characteristics to the vector to permit the vectors to move DNA from an original cloning host, such as bacteria, to the desired plant host. The basic bacterial/plant vector construct will preferably provide a broad host range prokaryote replication origin; a prokaryote selectable marker; and, for Agrobacterium transformations, T DNA sequences for Agrobacterium-mediated transfer to plant chromosomes. Where the heterologous gene is not readily amenable to detection, the construct will preferably also have a selectable marker gene suitable for determining if a plant cell has been transformed. A general review of suitable markers, for example for the members of the grass family, is found in Wilmink and Dons, 1993, Plant Mol. Biol. Reptr, 11(2):165-185.

[0122] Sequences suitable for permitting integration of the heterologous sequence into the plant genome are also recommended. These might include transposon sequences and the like for homologous recombination as well as Ti sequences which permit random insertion of a heterologous expression cassette into a plant genome. Suitable prokaryote selectable markers include resistance toward antibiotics such as ampicillin or tetracycline. Other DNA sequences encoding additional functions may also be present in the vector, as is known in the art.

[0123] The nucleic acid molecules of the subject invention may be included into an expression cassette for expression of the protein(s) of interest. Usually, there will be only one expression cassette, although two or more are feasible. The recombinant expression cassette will contain in addition to the heterologous protein encoding sequence the following elements, a promoter region, plant 5′ untranslated sequences, initiation codon depending upon whether or not the structural gene comes equipped with one, and a transcription and translation termination sequence. Unique restriction enzyme sites at the 5′ and 3′ ends of the cassette allow for easy insertion into a pre-existing vector.

[0124] A heterologous coding sequence may be for any protein relating to the present invention. The sequence encoding the protein of interest will encode a signal peptide which allows processing and translocation of the protein, as appropriate, and will usually lack any sequence which might result in the binding of the desired protein of the invention to a membrane. Since, for the most part, the transcriptional initiation region will be for a gene which is expressed and translocated during germination, by employing the signal peptide which provides for translocation, one may also provide for translocation of the protein of interest. In this way, the protein(s) of interest will be translocated from the cells in which they are expressed and may be efficiently harvested. Typically secretion in seeds are across the aleurone or scutellar epithelium layer into the endosperm of the seed. While it is not required that the protein be secreted from the cells in which the protein is produced, this facilitates the isolation and purification of the recombinant protein.

[0125] Since the ultimate expression of the desired gene product will be in a eucaryotic cell it is desirable to determine whether any portion of the cloned gene contains sequences which will be processed out as introns by the host's splicosome machinery. If so, site-directed mutagenesis of the “intron” region may be conducted to prevent losing a portion of the genetic message as a false intron code, Reed and Maniatis, Cell 41:95-105, 1985.

[0126] The vector can be microinjected directly into plant cells by use of micropipettes to mechanically transfer the recombinant DNA. Crossway, Mol Gen. Genet, 202:179-185, 1985. The genetic material may also be transferred into the plant cell by using polyethylene glycol, Krens, et al., Nature, 296, 72-74, 1982. Another method of introduction of nucleic acid segments is high velocity ballistic penetration by small particles with the nucleic acid either within the matrix of small beads or particles, or on the surface, Klein, et al., Nature, 327, 70-73, 1987 and Knudsen and Muller, 1991, Planta, 185:330-336 teaching particle bombardment of barley endosperm to create transgenic barley. Yet another method of introduction would be fusion of protoplasts with other entities, either minicells, cells, lysosomes or other fusible lipid-surfaced bodies, Fraley, et al., Proc. Natl. Acad. Sci. USA, 79, 1859-1863, 1982.

[0127] The vector may also be introduced into the plant cells by electroporation. (Fromm et al., Proc. Natl. Acad. Sci. USA 82:5824, 1985). In this technique, plant protoplasts are electroporated in the presence of plasmids containing the gene construct. Electrical impulses of high field strength reversibly permeabilize biomembranes allowing the introduction of the plasmids. Electroporated plant protoplasts reform the cell wall, divide, and form plant callus.

[0128] All plants from which protoplasts can be isolated and cultured to give whole regenerated plants can be transformed by the present invention so that whole plants are recovered which contain the transferred gene. It is known that practically all plants can be regenerated from cultured cells or tissues, including but not limited to all major species of sugarcane, sugar beet, cotton, fruit and other trees, legumes and vegetables. Some suitable plants include, for example, species from the genera Fragaria, Lotus, Medicago, Onobrychis, Trifolium, Trigonella, Vigna, Citrus, Linum, Geranium, Manihot, Daucus, Arabidopsis, Brassica, Raphanus, Sinapis, Atropa, Capsicum, Datura, Hyoscyamus, Lycopersion, Nicotiana, Solanum, Petunia, Digitalis, Majorana, Cichorium, Helianthus, Lactuca, Bromus, Asparagus, Antirrhinum, Hererocallis, Nemesia, Pelargonium, Panicum, Pennisetum, Ranunculus, Senecio, Salpiglossis, Cucumis, Browaalia, Glycine, Lolium, Zea, Triticum, Sorghum, and Datura.

[0129] Means for regeneration vary from species to species of plants, but generally a suspension of transformed protoplasts containing copies of the heterologous gene is first provided. Callus tissue is formed and shoots may be induced from callus and subsequently rooted. Alternatively, embryo formation can be induced from the protoplast suspension. These embryos germinate as natural embryos to form plants. The culture media will generally contain various amino acids and hormones, such as auxin and cytokinins. It is also advantageous to add glutamic acid and proline to the medium, especially for such species as corn and alfalfa. Shoots and roots normally develop simultaneously. Efficient regeneration will depend on the medium, on the genotype, and on the history of the culture. If these three variables are controlled, then regeneration is fully reproducible and repeatable.

[0130] In some plant cell culture systems, the desired protein of the invention may be excreted or alternatively, the protein may be extracted from the whole plant. Where the desired protein of the invention is secreted into the medium, it may be collected. Alternatively, the embryos and embryoless-half seeds or other plant tissue may be mechanically disrupted to release any secreted protein between cells and tissues. The mixture may be suspended in a buffer solution to retrieve soluble proteins. Conventional protein isolation and purification methods will be then used to purify the recombinant protein. Parameters of time, temperature pH, oxygen, and volumes will be adjusted through routine methods to optimize expression and recovery of heterologous protein.

iv. Bacterial Systems

[0131] Bacterial expression techniques are known in the art. A bacterial promoter is any DNA sequence capable of binding bacterial RNA polymerase and initiating the downstream (3′) transcription of a coding sequence (eg. structural gene) into mRNA. A promoter will have a transcription initiation region which is usually placed proximal to the 5′ end of the coding sequence. This transcription initiation region usually includes an RNA polymerase binding site and a transcription initiation site. A bacterial promoter may also have a second domain called an operator, that may overlap an adjacent RNA polymerase binding site at which RNA synthesis begins. The operator permits negative regulated (inducible) transcription, as a gene repressor protein may bind the operator and thereby inhibit transcription of a specific gene. Constitutive expression may occur in the absence of negative regulatory elements, such as the operator. In addition, positive regulation may be achieved by a gene activator protein binding sequence, which, if present is usually proximal (5′) to the RNA polymerase binding sequence. An example of a gene activator protein is the catabolite activator protein (CAP), which helps initiate transcription of the lac operon in Escherichia coli (E. coli) [Raibaud et al. (1984) Annu. Rev. Genet. 18:173]. Regulated expression may therefore be either positive or negative, thereby either enhancing or reducing transcription.

[0132] Sequences encoding metabolic pathway enzymes provide particularly useful promoter sequences. Examples include promoter sequences derived from sugar metabolizing enzymes, such as galactose, lactose (lac) [Chang et al. (1977) Nature 198:1056], and maltose. Additional examples include promoter sequences derived from biosynthetic enzymes such as tryptophan (trp) [Goeddel et al. (1980) Nuc. Acids Res. 8:4057; Yelverton et al. (1981) Nucl. Acids Res. 9:731; U.S. Pat. No. 4,738,921; EP-A-0036776 and EP-A-0121775]. The g-laotamase (bla) promoter system [Weissmann (1981) “The cloning of interferon and other mistakes.” In Interferon 3 (ed. I. Gresser)], bacteriophage lambda PL [Shimatake et al. (1981) Nature 292:128] and TS [U.S. Pat. No. 4,689,406] promoter systems also provide useful promoter sequences.

[0133] In addition, synthetic promoters which do not occur in nature also function as bacterial promoters. For example, transcription activation sequences of one bacterial or bacteriophage promoter may be joined with the operon sequences of another bacterial or bacteriophage promoter, creating a synthetic hybrid promoter [U.S. Pat. No. 4,551,433]. For example, the tac promoter is a hybrid trp-lac promoter comprised of both trp promoter and lac operon sequences that is regulated by the lac repressor [Amann et al. (1983) Gene 25:167; de Boer et al. (1983) Proc. Natl. Acad. Sci. 80:21]. Furthermore, a bacterial promoter can include naturally occurring promoters of non-bacterial origin that have the ability to bind bacterial RNA polymerase and initiate transcription. A naturally occurring promoter of non-bacterial origin can also be coupled with a compatible RNA polymerase to produce high levels of expression of some genes in prokaryotes. The bacteriophage T7 RNA polymerase/promoter system is an example of a coupled promoter system [Studier et al. (1986) J. Mol. Biol. 189:113; Tabor et al. (1985) Proc Natl. Acad. Sci. 82:1074]. In addition, a hybrid promoter can also be comprised of a bacteriophage promoter and an E. coli operator region (EPO-A-0 267 851).

[0134] In addition to a functioning promoter sequence, an efficient ribosome binding site is also useful for the expression of foreign genes in prokaryotes. In E. coli, the ribosome binding site is called the Shine-Dalgarno (SD) sequence and includes an initiation codon (ATG) and a sequence 3-9 nucleotides in length located 3-11 nucleotides upstream of the initiation codon [Shine et al. (1975) Nature 254:34]. The SD sequence is thought to promote binding of mRNA to the ribosome by the pairing of bases between the SD sequence and the 3′ and of E. coli 16S rRNA [Steitz et al. (1979) “Genetic signals and nucleotide sequences in messenger RNA.” In Biological Regulation and Development: Gene Expression (ed. R. F. Goldberger)]. To express eukaryotic genes and prokaryotic genes with weak ribosome-binding site [Sambrook et al. (1989) “Expression of cloned genes in Escherichia coli.” In Molecular Cloning: A Laboratory Manual].

[0135] A DNA molecule may be expressed intracellularly. A promoter sequence may be directly linked with the DNA molecule, in which case the first amino acid at the N-terminus will always be a methionine, which is encoded by the ATG start codon. If desired, methionine at the N-terminus may be cleaved from the protein by in vitro incubation with cyanogen bromide or by either in vivo on in vitro incubation with a bacterial methionine N-terminal peptidase (EP-A-0 219 237).

[0136] Fusion proteins provide an alternative to direct expression. Usually, a DNA sequence encoding the N-terminal portion of an endogenous bacterial protein, or other stable protein, is fused to the 5′ end of heterologous coding sequences. Upon expression, this construct will provide a fusion of the two amino acid sequences. For example, the bacteriophage lambda cell gene can be linked at the 5′ terminus of a foreign gene and expressed in bacteria. The resulting fusion protein preferably retains a site for a processing enzyme (factor Xa) to cleave the bacteriophage protein from the foreign gene [Nagai et al. (1984) Nature 309:810]. Fusion proteins can also be made with sequences from the lacZ [Jia et al. (1987) Gene 60:197], trpE [Allen et al. (1987) J. Biotechnol. 5:93; Makoff et al. (1989) J. Gen. Microbiol. 135:11], and Chey [EP-A-0 324 647] genes. The DNA sequence at the junction of the two amino acid sequences may or may not encode a cleavable site. Another example is a ubiquitin fusion protein. Such a fusion protein is made with the ubiquitin region that preferably retains a site for a processing enzyme (eg. ubiquitin specific processing-protease) to cleave the ubiquitin from the foreign protein. Through this method, native foreign protein can be isolated [Miller et al. (1989) Bio/Technology 7:698].

[0137] Alternatively, foreign proteins can also be secreted from the cell by creating chimeric DNA molecules that encode a fusion protein comprised of a signal peptide sequence fragment that provides for secretion of the foreign protein in bacteria [U.S. Pat. No. 4,336,336]. The signal sequence fragment usually encodes a signal peptide comprised of hydrophobic amino acids which direct the secretion of the protein from the cell. The protein is either secreted into the growth media (gram-positive bacteria) or into the periplasmic space, located between the inner and outer membrane of the cell (gram-negative bacteria). Preferably there are processing sites, which can be cleaved either in vivo or in vitro encoded between the signal peptide fragment and the foreign gene.

[0138] DNA encoding suitable signal sequences can be derived from genes for secreted bacterial proteins, such as the E. coli outer membrane protein gene (ompA) [Masui et al. (1983), in: Experimental Manipulation of Gene Expression; Ghrayeb et al. (1984) EMBO J. 3:2437] and the E. coli alkaline phosphatase signal sequence (phoA) [Oka et al. (1985) Proc. Nail Acad. Sci. 82:7212]. As an additional example, the signal sequence of the alpha-amylase gene from various Bacillus strains can be used to secrete heterologous proteins from B. subtilis [Palva et al. (1982) Proc. Natl. Acad. Sci. USA 79:5582; EP-A-0 244 042].

[0139] Usually, transcription termination sequences recognized by bacteria are regulatory regions located 3′ to the translation stop codon, and thus together with the promoter flank the coding sequence. These sequences direct the transcription of an mRNA which can be translated into the polypeptide encoded by the DNA. Transcription termination sequences frequently include DNA sequences of about 50 nucleotides capable of forming stem loop structures that aid in terminating transcription. Examples include transcription termination sequences derived from genes with strong promoters, such as the trp gene in E. coli as well as other biosynthetic genes.

[0140] Usually, the above described components, comprising a promoter, signal sequence (if desired), coding sequence of interest, and transcription termination sequence, are put together into expression constructs. Expression constructs are often maintained in a replicon, such as an extrachromosomal element (eg. plasmids) capable of stable maintenance in a host, such as bacteria. The replicon will have a replication system, thus allowing it to be maintained in a prokaryotic host either for expression or for cloning and amplification. In addition, a replicon may be either a high or low copy number plasmid. A high copy number plasmid will generally have a copy number ranging from about 5 to about 200, and usually about 10 to about 150. A host containing a high copy number plasmid will preferably contain at least about 10, and more preferably at least about 20 plasmids. Either a high or low copy number vector may be selected, depending upon the effect of the vector and the foreign protein on the host.

[0141] Alternatively, the expression constructs can be integrated into the bacterial genome with an integrating vector. Integrating vectors usually contain at least one sequence homologous to the bacterial chromosome that allows the vector to integrate. Integrations appear to result from recombinations between homologous DNA in the vector and the bacterial chromosome. For example, integrating vectors constructed with DNA from various Bacillus strains integrate into the Bacillus chromosome (EP-A-0 127 328). Integrating vectors may also be comprised of bacteriophage or transposon sequences.

[0142] Usually, extrachromosomal and integrating expression constructs may contain selectable markers to allow for the selection of bacterial strains that have been transformed. Selectable markers can be expressed in the bacterial host and may include genes which render bacteria resistant to drugs such as ampicillin, chloramphenicol, erythromycin, kanamycin (neomycin), and tetracycline [Davies et al. (1978) Annu. Rev. Microbiol 32:469]. Selectable markers may also include biosynthetic genes, such as those in the histidine, tryptophan, and leucine biosynthetic pathways.

[0143] Alternatively, some of the above described components can be put together in transformation vectors. Transformation vectors are usually comprised of a selectable market that is either maintained in a replicon or developed into an integrating vector, as described above.

[0144] Expression and transformation vectors, either extra-chromosomal replicons or integrating vectors, have been developed for transformation into many bacteria. For example, expression vectors have been developed for, inter alia, the following bacteria: Bacillus subtilis [Palva et al. (1982) Proc. Natl. Acad. Sci. USA 79:5582; EP-A-0 036 259 and EP-A-0 063 953; WO 84/04541], Escherichia coli [Shimatake et al. (1981) Nature 292:128; Amann et al. (1985) Gene 40:183; Studier et al. (1986) J. Mol. Biol. 189:113; EP-A-0 036 776, EP-A-0 136 829 and EP-A-0 136 907], Streptococcus cremoris [Powell et al. (1988) Appl. Environ. Microbiol. 54:655]; Streptococcus lividans [Powell et al. (1988) Appl. Environ. Microbiol. 54:655], Streptomyces lividans [U.S. Pat. No. 4,745,056].

[0145] Methods of introducing exogenous DNA into bacterial hosts are well-known in the art, and usually include either the transformation of bacteria treated with CaCl₂ or other agents, such as divalent cations and DMSO. DNA can also be introduced into bacterial cells by electroporation. Transformation procedures usually vary with the bacterial species to be transformed. See eg. [Masson et al. (1989) FEMS Microbiol. Lett. 60:273; Palva et al. (1982) Proc. Natl. Acad Sci. USA 79:5582; EP-A-0 036 259 and EP-A-0 063 953; WO 84/04541, Bacillus], [Miller et al. (1988) Proc. Natl. Acad. Sci. 85:856; Wang et al. (1990) J. Bacteriol. 172:949, Campylobacter], [Cohen et al. (1973) Proc. Natl. Acad. Sci. 69:2110; Dower et al. (1988) Nucleic Acids Res. 16:6127; Kushner (1978) “An improved method for transformation of Escherichia coli with ColE1-derived plasmids. In Genetic Engineering: Proceedings of the International Symposium on Genetic Engineering (eds. H. W. Boyer and S. Nicosia); Mandel et al. (1970) J. Mol. Biol. 53:159; Taketo (1988) Biochim. Biophys. Acta 949:318; Escherichia], [Chassy et al. (1987) FEMS Microbiol. Lett. 44:173 Lactobacillus]; [Fiedler et al. (1988) Anal. Biochem 170:38, Pseudomonas]; [Augustin et al. (1990) FEMS Microbiol. Lett. 66:203, Staphylococcus], [Barany et al. (1980) J. Bacteriol. 144:698; Harlander (1987) “Transformation of Streptococcus lactis by electroporation, in: Streptococcal Genetics (ed. J. Ferretti and R. Curtiss III); Perry et al. (1981) Infect. Immun. 32:1295; Powell et al. (1988) Appl. Environ. Microbiol. 54:655; Somkuti et al. (1987) Proc. 4th Evr. Cong. Biotechnology 1:412, Streptococcus].

v. Yeast Expression

[0146] Yeast expression systems are also known to one of ordinary skill in the art. A yeast promoter is any DNA sequence capable of binding yeast RNA polymerase and initiating the downstream (3) transcription of a coding sequence (eg. structural gene) into mRNA. A promoter will have a transcription initiation region which is usually placed proximal to the 5′ end of the coding sequence. This transcription initiation region usually includes an RNA polymerase binding site (the “TATA Box”) and a transcription initiation site. A yeast promoter may also have a second domain called an upstream activator sequence (UAS), which, if present, is usually distal to the structural gene. The UAS permits regulated (inducible) expression. Constitutive expression occurs in the absence of a UAS. Regulated expression may be either positive or negative, thereby either enhancing or reducing transcription.

[0147] Yeast is a fermenting organism with an active metabolic pathway, therefore sequences encoding enzymes in the metabolic pathway provide particularly useful promoter sequences. Examples include alcohol dehydrogenase (ADH) (EP-A-0 284 044), enolase, glucokinase, glucose-6-phosphate isomerase, glyceraldehyde-3-phosphate-dehydrogenase (GAP or GAPDH), hexokinase, phosphofructokinase, 3-phosphoglycerate mutase, and pyruvate kinase (PyK) (EPO-A-0 329 203). The yeast PHO5 gene, encoding acid phosphatase, also provides useful promoter sequences [Myanohara et al. (1983) Proc. Natl. Acad. Sci. USA 80:1].

[0148] In addition, synthetic promoters which do not occur in nature also function as yeast promoters. For example, UAS sequences of one yeast promoter may be joined with the transcription activation region of another yeast promoter, creating a synthetic hybrid promoter. Examples of such hybrid promoters include the ADH regulatory sequence linked to the GAP transcription activation region (U.S. Pat. Nos. 4,876,197 and 4,880,734). Other examples of hybrid promoters include promoters which consist of the regulatory sequences of either the ADH2, GAL4, GAL10, OR PHO5 genes, combined with the transcriptional activation region of a glycolytic enzyme gene such as GAP or PyK (EP-A-0 164 556). Furthermore, a yeast promoter can include naturally occurring promoters of non-yeast origin that have the ability to bind yeast RNA polymerase and initiate transcription. Examples of such promoters include, inter alia, [Cohen et al. (1980) Proc. Natl. Acad. Sci. USA 77:1078; Henikoff et al. (1981) Nature 283:835; Hollenberg et al. (1981) Curr. Topics Microbiol. Immunol. 96:119; Hollenberg et al. (1979) “The Expression of Bacterial Antibiotic Resistance Genes in the Yeast Saccharomyces cerevisiae,” in: Plasmids of Medical, Environmental and Commercial Importance (eds. K. N. Timmis and A. Puhler); Mercerau-Puigalon et al. (1980) Gene 11:163; Panthier et al. (1980) Curr. Genet. 2:109;].

[0149] A DNA molecule may be expressed intracellularly in yeast. A promoter sequence may be directly linked with the DNA molecule, in which case the first amino acid at the N-terminus of the recombinant protein will always be a methionine, which is encoded by the ATG start codon. If desired, methionine at the N-terminus may be cleaved from the protein by in vitro incubation with cyanogen bromide.

[0150] Fusion proteins provide an alternative for yeast expression systems, as well as in mammalian, baculovirus, and bacterial expression systems. Usually, a DNA sequence encoding the N-terminal portion of an endogenous yeast protein, or other stable protein, is fused to the 5′ end of heterologous coding sequences. Upon expression, this construct will provide a fusion of the two amino acid sequences. For example, the yeast or human superoxide dismutase (SOD) gene, can be linked at the 5′ terminus of a foreign gene and expressed in yeast. The DNA sequence at the junction of the two amino acid sequences may or may not encode a cleavable site. See eg. EP-A-0 196 056. Another example is a ubiquitin fusion protein. Such a fusion protein is made with the ubiquitin region that preferably retains a site for a processing enzyme (eg. ubiquitin-specific processing protease) to cleave the ubiquitin from the foreign protein. Through this method, therefore, native foreign protein can be isolated (eg. WO88/024066).

[0151] Alternatively, foreign proteins can also be secreted from the cell into the growth media by creating chimeric DNA molecules that encode a fusion protein comprised of a leader sequence fragment that provide for secretion in yeast of the foreign protein. Preferably, there are processing sites encoded between the leader fragment and the foreign gene that can be cleaved either in vivo or in vitro. The leader sequence fragment usually encodes a signal peptide comprised of hydrophobic amino acids which direct the secretion of the protein from the cell.

[0152] DNA encoding suitable signal sequences can be derived from genes for secreted yeast proteins, such as the yeast invertase gene (EP-A-0 012 873; JPO. 62,096,086) and the A-factor gene (U.S. Pat. No. 4,588,684). Alternatively, leaders of non-yeast origin, such as an interferon leader, exist that also provide for secretion in yeast (EP-A-0 060 057).

[0153] A preferred class of secretion leaders are those that employ a fragment of the yeast alpha-factor gene, which contains both a “pre” signal sequence, and a “pro” region. The types of alpha-factor fragments that can be employed include the full-length pre-pro alpha factor leader (about 83 amino acid residues) as well as truncated alpha-factor leaders (usually about 25 to about 50 amino acid residues) (U.S. Pat. Nos. 4,546,083 and 4,870,008; EP-A-0 324 274). Additional leaders employing an alpha-factor leader fragment that provides for secretion include hybrid alpha-factor leaders made with a presequence of a first yeast, but a pro-region from a second yeast alphafactor. (eg. see WO 89/02463.)

[0154] Usually, transcription termination sequences recognized by yeast are regulatory regions located 3′ to the translation stop codon, and thus together with the promoter flank the coding sequence. These sequences direct the transcription of an mRNA which can be translated into the polypeptide encoded by the DNA. Examples of transcription terminator sequence and other yeast-recognized termination sequences, such as those coding for glycolytic enzymes.

[0155] Usually, the above described components, comprising a promoter, leader (if desired), coding sequence of interest, and transcription termination sequence, are put together into expression constructs. Expression constructs are often maintained in a replicon, such as an extrachromosomal element (eg. plasmids) capable of stable maintenance in a host, such as yeast or bacteria. The replicon may have two replication systems, thus allowing it to be maintained, for example, in yeast for expression and in a prokaryotic host for cloning and amplification. Examples of such yeast-bacteria shuttle vectors include YEp24 [Botstein et al. (1979) Gene 8:17-24], pCl/1 [Brake et al. (1984) Proc. Natl. Acad. Sci USA 81:4642-4646], and YRp17 [Stinchcomb et al. (1982) J. Mol. Biol. 158:157]. In addition, a replicon may be either a high or low copy number plasmid. A high copy number plasmid will generally have a copy number ranging from about 5 to about 200, and usually about 10 to about 150. A host containing a high copy number plasmid will preferably have at least about 10, and more preferably at least about 20. Enter a high or low copy number vector may be selected, depending upon the effect of the vector and the foreign protein on the host. See eg. Brake et al., supra.

[0156] Alternatively, the expression constructs can be integrated into the yeast genome with an integrating vector. Integrating vectors usually contain at least one sequence homologous to a yeast chromosome that allows the vector to integrate, and preferably contain two homologous sequences flanking the expression construct. Integrations appear to result from recombinations between homologous DNA in the vector and the yeast chromosome [Orr-Weaver et al. (1983) Methods in Enzymol. 101:228-245]. An integrating vector may be directed to a specific locus in yeast by selecting the appropriate homologous sequence for inclusion in the vector. See Orr-Weaver et al., supra. One or more expression construct may integrate, possibly affecting levels of recombinant protein produced [Rine et al. (1983) Proc. Natl. Acad. Sci. USA 80:6750]. The chromosomal sequences included in the vector can occur either as a single segment in the vector, which results in the integration of the entire vector, or two segments homologous to adjacent segments in the chromosome and flanking the expression construct in the vector, which can result in the stable integration of only the expression construct.

[0157] Usually, extrachromosomal and integrating expression constructs may contain selectable markers to allow for the selection of yeast strains that have been transformed. Selectable markers may include biosynthetic genes that can be expressed in the yeast host, such as ADE2, HIS4, LEU2, TRP1, and ALG7, and the G418 resistance gene, which confer resistance in yeast cells to tunicamycin and G418, respectively. In addition, a suitable selectable marker may also provide yeast with the ability to grow in the presence of toxic compounds, such as metal. For example, the presence of CUP1 allows yeast to grow in the presence of copper ions [Butt et al. (1987) Microbiol, Rev. 51:351].

[0158] Alternatively, some of the above described components can be put together into transformation vectors. Transformation vectors are usually comprised of a selectable marker that is either maintained in a replicon or developed into an integrating vector, as described above.

[0159] Expression and transformation vectors, either extrachromosomal replicons or integrating vectors, have been developed for transformation into many yeasts. For example, expression vectors have been developed for, inter alia, the following yeasts: Candida albicans [Kurtz, et al. (1986) Mol. Cell. Biol. 6:142], Candida maltosa [Kunze, et al. (1985) J. Basic Microbiol. 25:141]. Hansenula polymorpha [Gleeson, et al. (1986) J. Gen. Microbiol. 132:3459; Roggenkamp et al. (1986) Mol. Gen. Genet. 202:302], Kluyveromyces fragilis [Das, et al. (1984) J. Bacteriol. 158:1165], Kluyveromyces lactis [De Louvencourt et al. (1983) J. Bacteriol. 154:737; Van den Berg et al. (1990) Bio/Technology 8:135], Pichia guillerimondii [Kunze et al. (1985) J. Basic Microbiol. 25:141], Pichia pastoris [Cregg, et al. (1985) Mol. Cell. Biol. 5:3376; U.S. Pat. Nos. 4,837,148 and 4,929,555], Saccharomyces cerevisiae [Hinnen et al. (1978) Proc. Natl. Acad. Sci. USA 75:1929; Ito et al. (1983) J. Bacteriol. 153:163], Schizosaccharomyces pombe [Beach and Nurse (1981) Nature 300:706], and Yarrowia lipolytica [Davidow, et al. (1985) Curr. Genet. 10:380471 Gaillardin, et al. (1985) Curr. Genet. 10:49].

[0160] Methods of introducing exogenous DNA into yeast hosts are well-known in the art, and usually include either the transformation of spheroplasts or of intact yeast cells treated with alkali cations. Transformation procedures usually vary with the yeast species to be transformed. See eg. [Kurtz et al. (1986) Mol. Cell. Biol. 6:142; Kunze et al. (1985) J. Basic Microbiol. 25:141; Candida]; [Gleeson et al. (1986) J. Gen. Microbiol. 132:3459; Roggenkamp et al. (1986) Mol. Gen. Genet. 202:302; Hansenula]; [Das et al. (1984) J. Bacteriol. 158:1165; De Louvencourt et al. (1983) J. Bacteriol. 154:1165; Van den Berg et al. (1990) Bio/Technology 8:135; Kluyveromyces]; [Cregg et al. (1985) Mol. Cell. Biol. 5:3376; Kunze et al. (1985) J. Basic Microbiol. 25:141; U.S. Pat. Nos. 4,837,148 and 4,929,555; Pichia]; [Hinnen et al. (1978) Proc. Natl. Acad. Sci USA 75; 1929; Ito et al. (1983) J. Bacteriol. 153:163 Saccharomyces]; [Beach and Nurse (1981) Nature 300:706; Schizosaccharomyces]; [Davidow et al. (1985) Curr. Genet. 10:39; Gaillardin et al. (1985) Curr. Genet. 10:49; Yarrowia].

Antibodies

[0161] As used herein, the term “antibody” refers to a polypeptide or group of polypeptides composed of at least one antibody combining site. An “antibody combining site” is the three-dimensional binding space with an internal surface shape and charge distribution complementary to the features of an epitope of an antigen, which allows a binding of the antibody with the antigen. “Antibody” includes, for example, vertebrate antibodies, hybrid antibodies, chimeric antibodies, humanised antibodies, altered antibodies, univalent antibodies, Fab proteins, and single domain antibodies.

[0162] Antibodies against the proteins of the invention are useful for affinity chromatography, immunoassays, and distinguishing/identifying streptococcus proteins.

[0163] Antibodies to the proteins of the invention, both polyclonal and monoclonal, may be prepared by conventional methods. In general, the protein is first used to immunize a suitable animal, preferably a mouse, rat, rabbit or goat. Rabbits and goats are preferred for the preparation of polyclonal sera due to the volume of serum obtainable, and the availability of labeled anti-rabbit and anti-goat antibodies. Immunization is generally performed by mixing or emulsifying the protein in saline, preferably in an adjuvant such as Freund's complete adjuvant, and injecting the mixture or emulsion parenterally (generally subcutaneously or intramuscularly). A dose of 50-200 μg/injection is typically sufficient. Immunization is generally boosted 2-6 weeks later with one or more injections of the protein in saline, preferably using Freund's incomplete adjuvant. One may alternatively generate antibodies by in vitro immunization using methods known in the art, which for the purposes of this invention is considered equivalent to in vivo immunization. Polyclonal antisera is obtained by bleeding the immunized animal into a glass or plastic container, incubating the blood at 25° C. for one hour, followed by incubating at 4° C. for 2-18 hours. The serum is recovered by centrifugation (eg. 1,000 g for 10 minutes). About 20-50 ml per bleed may be obtained from rabbits.

[0164] Monoclonal antibodies are prepared using the standard method of Kohler & Milstein [Nature (1975) 256:495-96], or a modification thereof. Typically, a mouse or rat is immunized as described above. However, rather than bleeding the animal to extract serum, the spleen (and optionally several large lymph nodes) is removed and dissociated into single cells. If desired, the spleen cells may be screened (after removal of nonspecifically adherent cells) by applying a cell suspension to a plate or well coated with the protein antigen. B-cells expressing membrane-bound immunoglobulin specific for the antigen bind to the plate, and are not rinsed away with the rest of the suspension. Resulting B-cells, or all dissociated spleen cells, are then induced to fuse with myeloma cells to form hybridomas, and are cultured in a selective medium (eg. hypoxanthine, aminopterin, thymidine medium, “HAT”). The resulting hybridomas are plated by limiting dilution, and are assayed for production of antibodies which bind specifically to the immunizing antigen (and which do not bind to unrelated antigens). The selected MAb-secreting hybridomas are then cultured either in vitro (eg. in tissue culture bottles or hollow fiber reactors), or in vivo (as ascites in mice).

[0165] If desired, the antibodies (whether polyclonal or monoclonal) may be labeled using conventional techniques. Suitable labels include fluorophores, chromophores, radioactive atoms (particularly ³²P and ¹²⁵I), electron-dense reagents, enzymes, and ligands having specific binding partners. Enzymes are typically detected by their activity. For example, horseradish peroxidase is usually detected by its ability to convert 3,3′,5,5′-tetramethylbenzidine (TMB) to a blue pigment, quantifiable with a spectrophotometer. “Specific binding partner” refers to a protein capable of binding a ligand molecule with high specificity, as for example in the case of an antigen and a monoclonal antibody specific therefor. Other specific binding partners include biotin and avidin or streptavidin, IgG and protein A, and the numerous receptor-ligand couples known in the art. It should be understood that the above description is not meant to categorize the various labels into distinct classes, as the same label may serve in several different modes. For example, ¹²⁵I may serve as a radioactive label or as an electron-dense reagent. HRP may serve as enzyme or as antigen for a MAb. Further, one may combine various labels for desired effect. For example, MAbs and avidin also require labels in the practice of this invention: thus, one might label a MAb with biotin, and detect its presence with avidin labeled with ¹²⁵I, or with an anti-biotin MAb labeled with HRP. Other permutations and possibilities will be readily apparent to those of ordinary skill in the art, and are considered as equivalents within the scope of the instant invention.

Pharmaceutical Compositions

[0166] Pharmaceutical compositions can comprise either polypeptides, antibodies, or nucleic acid of the invention. The pharmaceutical compositions will comprise a therapeutically effective amount of either polypeptides, antibodies, or polynucleotides of the claimed invention.

[0167] The term “therapeutically effective amount” as used herein refers to an amount of a therapeutic agent to treat, ameliorate, or prevent a desired disease or condition, or to exhibit a detectable therapeutic or preventative effect. The effect can be detected by, for example, chemical markers or antigen levels. Therapeutic effects also include reduction in physical symptoms, such as decreased body temperature. The precise effective amount for a subject will depend upon the subject's size and health, the nature and extent of the condition, and the therapeutics or combination of therapeutics selected for administration. Thus, it is not useful to specify an exact effective amount in advance. However, the effective amount for a given situation can be determined by routine experimentation and is within the judgement of the clinician.

[0168] For purposes of the present invention, an effective dose will be from about 0.01 mg/kg to 50 mg/kg or 0.05 mg/kg to about 10 mg/kg of the molecule of the invention in the individual to which it is administered.

[0169] A pharmaceutical composition can also contain a pharmaceutically acceptable carrier. The term “pharmaceutically acceptable carrier” refers to a carrier for administration of a therapeutic agent, such as antibodies or a polypeptide, genes, and other therapeutic agents. The term refers to any pharmaceutical carrier that does not itself induce the production of antibodies harmful to the individual receiving the composition, and which may be administered without undue toxicity. Suitable carriers may be large, slowly metabolized macromolecules such as proteins, polysaccharides, polylactic acids, polyglycolic acids, polymeric amino acids, amino acid copolymers, and inactive virus particles. Such carriers are well known to those of ordinary skill in the art.

[0170] Pharmaceutically acceptable salts can be used therein, for example, mineral acid salts such as hydrochlorides, hydrobromides, phosphates, sulfates, and the like; and the salts of organic acids such as acetates, propionates, malonates, benzoates, and the like. A thorough discussion of pharmaceutically acceptable excipients is available in Remington's Pharmaceutical Sciences (Mack Pub. Co., N.J. 1991).

[0171] Pharmaceutically acceptable carriers in therapeutic compositions may contain liquids such as water, saline, glycerol and ethanol. Additionally, auxiliary substances, such as wetting or emulsifying agents, pH buffering substances, and the like, may be present in such vehicles. Typically, the therapeutic compositions are prepared as injectables, either as liquid solutions or suspensions; solid forms suitable for solution in, or suspension in, liquid vehicles prior to injection may also be prepared. Liposomes are included within the definition of a pharmaceutically acceptable carrier.

Delivery Methods

[0172] Once formulated, the compositions of the invention can be administered directly to the subject. The subjects to be treated can be animals; in particular, human subjects can be treated.

[0173] Direct delivery of the compositions will generally be accomplished by injection, either subcutaneously, intraperitoneally, intravenously or intramuscularly or delivered to the interstitial space of a tissue. The compositions can also be administered into a lesion. Other modes of administration include oral and pulmonary administration, suppositories, and transdermal or transcutaneous applications (eg. see WO98/20734), needles, and gene guns or hyposprays. Dosage treatment may be a single dose schedule or a multiple dose schedule.

Vaccines

[0174] Vaccines according to the invention may either be prophylactic (ie. to prevent infection) or therapeutic (ie. to treat disease after infection).

[0175] Such vaccines comprise immunising antigen(s), immunogen(s), polypeptide(s), protein(s) or nucleic acid, usually in combination with “pharmaceutically acceptable carriers,” which include any carrier that does not itself induce the production of antibodies harmful to the individual receiving the composition. Suitable carriers are typically large, slowly metabolized macromolecules such as proteins, polysaccharides, polylactic acids, polyglycolic acids, polymeric amino acids, amino acid copolymers, lipid aggregates (such as oil droplets or liposomes), and inactive virus particles. Such carriers are well known to those of ordinary skill in the art. Additionally, these carriers may function as immunostimulating agents (“adjuvants”). Furthermore, the antigen or immunogen may be conjugated to a bacterial toxoid, such as a toxoid from diphtheria, tetanus, cholera, H. pylori, etc. pathogens.

[0176] Preferred adjuvants to enhance effectiveness of the composition include, but are not limited to: (1) oil-in-water emulsion formulations (with or without other specific immunostimulating agents such as muramyl peptides (see below) or bacterial cell wall components), such as for example (a) MF59™ (WO90/14837; Chapter 10 in Vaccine Design—the subunit and adjuvant approach (1995) ed. Powell & Newman), containing 5% Squalene, 0.5% Tween 80, and 0.5% Span 85 (optionally containing MTP-PE) formulated into submicron particles using a microfluidizer, (b) SAF, containing 10% Squalane, 0.4% Tween 80, 5% pluronic-blocked polymer L121, and thr-MDP either microfluidized into a submicron emulsion or vortexed to generate a larger particle size emulsion, and (c) Ribi™ adjuvant system (RAS), (Ribi Immunochem, Hamilton, Mont.) containing 2% Squalene, 0.2% Tween 80, and one or more bacterial cell wall components from the group consisting of monophosphorylipid A (MPL), trehalose dimycolate (TDM), and cell wall skeleton (CWS), preferably MPL+CWS (Detox™); (2) saponin adjuvants, such as QS21 or Stimulon™ (Cambridge Bioscience, Worcester, Mass.) may be used or particles generated therefrom such as ISCOMs (immunostimulating complexes), which ISCOMS may be devoid of additional detergent e.g. WO00/07621; (3) Complete Freund's Adjuvant (CFA) and Incomplete Freund's Adjuvant (IFA); (4) cytokines, such as interleukins (e.g. IL-1, IL-2, IL-4, IL-5, IL-6, IL-7, IL-12 (WO99/44636), etc.), interferons (e.g. gamma interferon), macrophage colony stimulating factor (M-CSF), tumor necrosis factor (TNF), etc.; (5) monophosphoryl lipid A (MPL) or 3-O-deacylated MPL (3dMPL) e.g. GB-2220221, EP-A-0689454; (6) combinations of 3dMPL with, for example, QS21 and/or oil-in-water emulsions e.g. EP-A-0835318, EP-A-0735898, EP-A-0761231; (7) oligonucleotides comprising CpG motifs [Krieg Vaccine 2000, 19, 618-622; Krieg Curr opin Mol Ther 2001 3:15-24; Roman et al., Nat. Med., 1997, 3, 849-854; Weiner et al., PNAS USA, 1997, 94, 10833-10837; Davis et al., J. Immunol., 1998, 160, 870-876; Chu et al., J. Exp. Med, 1997, 186, 1623-1631; Lipford et al., Eur. J. Immunol., 1997, 27, 2340-2344; Moldoveanu et al., Vaccine, 1988, 16, 1216-1224, Krieg et al, Nature, 1995, 374, 546-549; Klinman et al, PNAS USA, 1996, 93, 2879-2883; Ballas et al., J. Immunol., 1996, 157, 1840-1845; Cowdery et al., J. Immunol., 1996, 156, 4570-4575; Halpern et al., Cell. Immunol., 1996, 167, 72-78; Yamamoto et al., Jpn. J. Cancer Res., 1988, 79, 866-873; Stacey et al., J. Immunol., 1996, 157, 2116-2122; Messina et al, J. Immunol., 1991, 147, 1759-1764; Yi et al, J. Immunol., 1996, 157, 4918-4925; Yi et al., J. Immunol., 1996, 157, 5394-5402; Yi et al, J. Immunol., 1998, 160, 4755-4761; and Yi et al., J. Immunol, 1998, 160, 5898-5906; International patent applications WO96/02555, WO98/16247, WO98/18810, WO98/40100, WO98/55495, WO98/37919 and WO98/52581] i.e. containing at least one CG dinucleotide, with 5-methylcytosine optionally being used in place of cytosine; (8) a polyoxyethylene ether or a polyoxyethylene ester e.g. WO99/52549; (9) a polyoxyethylene sorbitan ester surfactant in combination with an octoxynol (e.g. WO01/21207) or a polyoxyethylene alkyl ether or ester surfactant in combination with at least one additional non-ionic surfactant such as an octoxynol (e.g. WO01/21152); (10) an immunostimulatory oligonucleotide (e.g. a CpG oligonucleotide) and a saponin e.g. WO00/62800; (11) an immunostimulant and a particle of metal salt e.g. WO00/23105; (12) a saponin and an oil-in-water emulsion e.g. WO99/11241; (13) a saponin (e.g. QS21)+3dMPL+IL-12 (optionally +a sterol) e.g. WO98/57659; (14) aluminium salts, preferably hydroxide or phosphate, but any other suitable salt may also be used (e.g. hydroxyphosphate, oxyhydroxide, orthophosphate, sulphate etc. [e.g. see chapters 8 & 9 of Powell & Newman]). Mixtures of different aluminium salts may also be used. The salt may take any suitable form (e.g. gel, crystalline, amorphous etc.); (15) other substances that act as immunostimulating agents to enhance the efficacy of the composition.

[0177] Further adjuvants which may be used are: (1) microparticles (ie. a particle of ˜100 nm to ˜150 μm in diameter, more preferably ˜200 nm to ˜30 μm in diameter, and most preferably ˜500 nm to ˜10 μm in diameter) formed from materials that are biodegradable and non-toxic (e.g. a poly(α-hydroxy acid) such as poly(lactide-co-glycolide), a polyhydroxybutyric acid, a polyorthoester, a polyanhydride, a polycaprolactone etc.). optionally treated to have a negatively-charged surface (eg. with SDS) or a positively-charged surface (e.g. with a cationic detergent, such as CTAB); (2) E. coli heat-labile enterotoxin (“LT”), or detoxified mutants thereof, such as the K63 or R72 mutants [e.g. Chapter 5 of Del Giudice et al. (1998) Molecular Aspects of Medicine, vol. 19, number 1.]; (3) cholera toxin (“CT”), or detoxified mutants thereof [e.g. Del Giudice et al., supra]; (4) liposomes; (5) double-stranded RNA; (6) monophosphoryl lipid A mimics, such as aminoalkyl glucosaminide phosphate derivatives e.g. RC-529 [Johnson et al (1999) Bioorg Med Chem Lett 9:2273-2278.]; (7) polyphosphazene (PCPP); (8) a bioadhesive [WO00/50078] such as esterified hyaluronic acid microspheres [Singh et al. (2001) J. Cont. Rele. 70:267-276.] or a mucoadhesive selected from the group consisting of cross-linked derivatives of poly(acrylic acid), polyvinyl alcohol, polyvinyl pyrollidone, polysaccharides and carboxymethylcellulose.

[0178] Aluminium salts are preferred adjuvants. Where an aluminium salt it used, it is possible to adsorb one or more of the antigens to the aluminium salt.

[0179] As mentioned above, muramyl peptides include, but are not limited to, N-acetyl-muramyl-L-threonyl-D-isoglutamine (thr-MDP), N-acetyl-normuramyl-L-alanyl-D-isoglutamine (nor-MDP), N-acetylmuramyl-L-alanyl-D-isoglutaminyl-L-alanine-2-(1′-2′-dipalmitoyl-sn-glycero-3-hydroxyphosphoryloxy]ethylamine (MTP-PE), etc.

[0180] The immunogenic compositions (eg. the immunising antigen/immunogen/polypeptide/protein/nucleic acid, pharmaceutically acceptable carrier, and adjuvant) typically will contain diluents, such as water, saline, glycerol, ethanol, etc. Additionally, auxiliary substances, such as wetting or emulsifying agents, pH buffering substances, and the like, may be present in such vehicles.

[0181] Typically, the immunogenic compositions are prepared as injectables, either as liquid solutions or suspensions; solid forms suitable for solution in, or suspension in, liquid vehicles prior to injection may also be prepared. The preparation also may be emulsified or encapsulated in liposomes for enhanced adjuvant effect, as discussed above under pharmaceutically acceptable carriers.

[0182] Immunogenic compositions used as vaccines comprise an immunologically effective amount of the antigenic or immunogenic polypeptides, as well as any other of the above-mentioned components, as needed. By “immunologically effective amount”, it is meant that the administration of that amount to an individual, either in a single dose or as part of a series, is effective for treatment or prevention. This amount varies depending upon the health and physical condition of the individual to be treated, the taxonomic group of individual to be treated (eg. nonhuman primate, primate, etc.), the capacity of the individual's immune system to synthesize antibodies, the degree of protection desired, the formulation of the vaccine, the treating doctor's assessment of the medical situation, and other relevant factors. It is expected that the amount will fall in a relatively broad range that can be determined through routine trials.

[0183] The immunogenic compositions are conventionally administered parenterally, eg. by injection, either subcutaneously, intramuscularly, or transdermally/transcutaneously (eg. WO98/20734). Additional formulations suitable for other modes of administration include oral and pulmonary formulations, suppositories, and transdermal applications. Dosage treatment may be a single dose schedule or a multiple dose schedule. The vaccine may be administered in conjunction with other immunoregulatory agents.

[0184] As an alternative to protein-based vaccines, DNA vaccination may be used [eg. Robinson & Torres (1997) Seminars in Immunol 9:271-283; Donnelly et al. (1997) Annu Rev Immunol 15:617-648; later herein].

Gene Delivery Vehicles

[0185] Gene therapy vehicles for delivery of constructs including a coding sequence of a therapeutic of the invention, to be delivered to the mammal for expression in the mammal, can be administered either locally or systemically. These constructs can utilize viral or non-viral vector approaches in in vivo or ex vivo modality. Expression of such coding sequence can be induced using endogenous mammalian or heterologous promoters. Expression of the coding sequence in vivo can be either constitutive or regulated.

[0186] The invention includes gene delivery vehicles capable of expressing the contemplated nucleic acid sequences. The gene delivery vehicle is preferably a viral vector and, more preferably, a retroviral, adenoviral, adeno-associated viral (AAV), herpes viral, or alphavirus vector. The viral vector can also be an astrovirus, coronavirus, orthomyxovirus, papovavirus, paramyxovirus, parvovirus, picornavirus, poxvirus, or togavirus viral vector. See generally, Jolly (1994) Cancer Gene Therapy 1:51-44; Kimura (1994) Human Gene Therapy 5:845-852; Connelly (1995) Human Gene Therapy 6:185-193; and Kaplitt (1994) Nature Genetics 6:148-153.

[0187] Retroviral vectors are well known in the art and we contemplate that any retroviral gene therapy vector is employable in the invention, including B, C and D type retroviruses, xenotropic retroviruses (for example, NZB-X1, NZB-X2 and NZB9-1 (see O'Neill (1985) J. Virol. 53:160) polytropic retroviruses eg. MCF and MCF-MLV (see Kelly (1983) J. Virol. 45:291), spumaviruses and lentiviruses. See RNA Tumor Viruses, Second Edition, Cold Spring Harbor Laboratory, 1985.

[0188] Portions of the retroviral gene therapy vector may be derived from different retroviruses. For example, retrovector LTRs may be derived from a Murine Sarcoma Virus, a tRNA binding site from a Rous Sarcoma Virus, a packaging signal from a Murine Leukemia Virus, and an origin of second strand synthesis from an Avian Leukosis Virus.

[0189] These recombinant retroviral vectors may be used to generate transduction competent retroviral vector particles by introducing them into appropriate packaging cell lines (see U.S. Pat. No. 5,591,624). Retrovirus vectors can be constructed for site-specific integration into host cell DNA by incorporation of a chimeric integrase enzyme into the retroviral particle (see WO96/37626). It is preferable that the recombinant viral vector is a replication defective recombinant virus.

[0190] Packaging cell lines suitable for use with the above-described retrovirus vectors are well known in the art, are readily prepared (see WO95/30763 and WO92/05266), and can be used to create producer cell lines (also termed vector cell lines or “VCLs”) for the production of recombinant vector particles. Preferably, the packaging cell lines are made from human parent cells (eg. HT1080 cells) or mink parent cell lines, which eliminates inactivation in human serum.

[0191] Preferred retroviruses for the construction of retroviral gene therapy vectors include Avian Leukosis Virus, Bovine Leukemia, Virus, Murine Leukemia Virus, Mink-Cell Focus-inducing Virus, Murine Sarcoma Virus, Reticuloendotheliosis Virus and Rous Sarcoma Virus. Particularly preferred Murine Leukemia Viruses include 4070A and 1504A (Hartley and Rowe (1976) J Virol 19:19-25), Abelson (ATCC No. VR-999), Friend (ATCC No. VR-245), Graffi, Gross (ATCC Nol VR-590), Kirsten, Harvey Sarcoma Virus and Rauscher (ATCC No. VR-998) and Moloney Murine Leukemia Virus (ATCC No. VR-190). Such retroviruses may be obtained from depositories or collections such as the American Type Culture Collection (“ATCC”) in Rockville, Md. or isolated from known sources using commonly available techniques.

[0192] Exemplary known retroviral gene therapy vectors employable in this invention include those described in patent applications GB2200651, EP0415731, EP0345242, EP0334301, WO89/02468; WO89/05349, WO89/09271, WO90/02806, WO90/07936, WO94/03622, WO93/25698, WO93/25234, WO93/11230, WO93/10218, WO91/02805, WO91/02825, WO95/07994, U.S. Pat. No. 5,219,740, U.S. Pat. No. 4,405,712, U.S. Pat. No. 4,861,719, U.S. Pat. No. 4,980,289, U.S. Pat. No. 4,777,127, U.S. Pat. No. 5,591,624. See also Vile (1993) Cancer Res 53:3860-3864; Vile (1993) Cancer Res 53:962-967; Ram (1993) Cancer Res 53 (1993) 83-88; Takamiya (1992) J Neurosci Res 33:493-503; Baba (1993) J Neurosurg 79:729-735; Mann (1983) Cell 33:153; Cane (1984) Proc Natl Acad Sci 81:6349; and Miller (1990) Human Gene Therapy 1.

[0193] Human adenoviral gene therapy vectors are also known in the art and employable in this invention. See, for example, Berkner (1988) Biotechniques 6:616 and Rosenfeld (1991) Science 252:431, and WO93/07283, WO93/06223, and WO93/07282. Exemplary known adenoviral gene therapy vectors employable in this invention include those described in the above referenced documents and in WO94/12649, WO93/03769, WO93/19191, WO94/28938, WO95/11984, WO95/00655, WO95/27071, WO95/29993, WO95/34671, WO96/05320, WO94/08026, WO94/11506, WO93/06223, WO94/24299, WO95/14102, WO95/24297, WO95/02697, WO94/28152, WO94/24299, WO95/09241, WO95/25807, WO95/05835, WO94/18922 and WO95/09654. Alternatively, administration of DNA linked to killed adenovirus as described in Curiel (1992) Hum. Gene Ther. 3:147-154 may be employed. The gene delivery vehicles of the invention also include adenovirus associated virus (AAV) vectors. Leading and preferred examples of such vectors for use in this invention are the AAV-2 based vectors disclosed in Srivastava, WO93/09239. Most preferred AAV vectors comprise the two AAV inverted terminal repeats in which the native D-sequences are modified by substitution of nucleotides, such that at least 5 native nucleotides and up to 18 native nucleotides, preferably at least 10 native nucleotides up to 18 native nucleotides, most preferably 10 native nucleotides are retained and the remaining nucleotides of the D-sequence are deleted or replaced with non-native nucleotides. The native D-sequences of the AAV inverted terminal repeats are sequences of 20 consecutive nucleotides in each AAV inverted terminal repeat (ie. there is one sequence at each end) which are not involved in HP formation. The non-native replacement nucleotide may be any nucleotide other than the nucleotide found in the native D-sequence in the same position. Other employable exemplary AAV vectors are pWP-19, pWN-1, both of which are disclosed in Nahreini (1993) Gene 124:257-262. Another example of such an AAV vector is psub201 (see Samulski (1987) J. Virol. 61:3096). Another exemplary AAV vector is the Double-D ITR vector. Construction of the Double-D ITR vector is disclosed in U.S. Pat. No. 5,478,745. Still other vectors are those disclosed in Carter U.S. Pat. No. 4,797,368 and Muzyczka U.S. Pat. No. 5,139,941, Chartejee U.S. Pat. No. 5,474,935, and Kotin WO94/288157. Yet a further example of an AAV vector employable in this invention is SSV9AFABTKneo, which contains the AFP enhancer and albumin promoter and directs expression predominantly in the liver. Its structure and construction are disclosed in Su (1996) Human Gene Therapy 7:463-470. Additional AAV gene therapy vectors are described in U.S. Pat. No. 5,354,678, U.S. Pat. No. 5,173,414, U.S. Pat. No. 5,139,941, and U.S. Pat. No. 5,252,479.

[0194] The gene therapy vectors of the invention also include herpes vectors. Leading and preferred examples are herpes simplex virus vectors containing a sequence encoding a thymidine kinase polypeptide such as those disclosed in U.S. Pat. No. 5,288,641 and EP0176170 (Roizman). Additional exemplary herpes simplex virus vectors include HFEM/ICP6-LacZ disclosed in WO95/04139 (Wistar Institute), pHSVlac described in Geller (1988) Science 241:1667-1669 and in WO90/09441 and WO92/07945, HSV Us3::pgC-lacZ described in Fink (1992) Human Gene Therapy 3:11-19 and HSV 7134, 2 RH 105 and GAL4 described in EP 0453242 (Breakefield), and those deposited with the ATCC with accession numbers VR-977 and VR-260.

[0195] Also contemplated are alpha virus gene therapy vectors that can be employed in this invention. Preferred alpha virus vectors are Sindbis viruses vectors. Togaviruses, Semliki Forest virus (ATCC VR-67; ATCC VR-1247), Middleberg virus (ATCC VR-370), Ross River virus (ATCC VR-373; ATCC VR-1246), Venezuelan equine encephalitis virus (ATCC VR923; ATCC VR-1250; ATCC VR-1249; ATCC VR-532), and those described in U.S. Pat. Nos. 5,091,309, 5,217,879, and WO92/10578. More particularly, those alpha virus vectors described in U.S. Ser. No. 08/405,627, filed Mar. 15, 1995, WO94/21792, WO92/10578, WO95/07994, U.S. Pat. No. 5,091,309 and U.S. Pat. No. 5,217,879 are employable. Such alpha viruses may be obtained from depositories or collections such as the ATCC in Rockville, Md. or isolated from known sources using commonly available techniques. Preferably, alphavirus vectors with reduced cytotoxicity are used (see U.S. Ser. No. 08/679,640).

[0196] DNA vector systems such as eukaryotic layered expression systems are also useful for expressing the nucleic acids of the invention. See WO95/07994 for a detailed description of eukaryotic layered expression systems. Preferably, the eukaryotic layered expression systems of the invention are derived from alphavirus vectors and most preferably from Sindbis viral vectors.

[0197] Other viral vectors suitable for use in the present invention include those derived from poliovirus, for example ATCC VR-58 and those described in Evans, Nature 339 (1989) 385 and Sabin (1973) J. Biol. Standardization 1:115; rhinovirus, for example ATCC VR-1110 and those described in Arnold (1990) J. Cell Biochem L401; pox viruses such as canary pox virus or vaccinia virus, for example ATCC VR-111 and ATCC VR-2010 and those described in Fisher-Hoch (1989) Proc Natl Acad Sci 86:317; Flexner (1989) Ann NY Acad Sci 569:86, Flexner (1990) Vaccine 8:17; in U.S. Pat. No. 4,603,112 and U.S. Pat. No. 4,769,330 and WO89/01973; SV40 virus, for example ATCC VR-305 and those described in Mulligan (1979) Nature 277:108 and Madzak (1992) J Gen Virol 73:1533; influenza virus, for example ATCC VR-797 and recombinant influenza viruses made employing reverse genetics techniques as described in U.S. Pat. No. 5,166,057 and in Enami (1990) Proc Natl Acad Sci 87:3802-3805; Enami & Palese (1991) J Virol 65:2711-2713 and Luytjes (1989) Cell 59:110, (see also McMichael (1983) NEJ Med 309:13, and Yap (1978) Nature 273:238 and Nature (1979) 277:108); human immunodeficiency virus as described in EP-0386882 and in Buchschacher (1992) J. Virol. 66:2731; measles virus, for example ATCC VR-67 and VR-1247 and those described in EP-0440219; Aura virus, for example ATCC VR-368; Bebaru virus, for example ATCC VR-600 and ATCC VR-1240; Cabassou virus, for example ATCC VR-922; Chikungunya virus, for example ATCC VR-64 and ATCC VR-1241; Fort Morgan Virus, for example ATCC VR-924; Getah virus, for example ATCC VR-369 and ATCC VR-1243; Kyzylagach virus, for example ATCC VR-927; Mayaro virus, for example ATCC VR-66; Mucambo virus, for example ATCC VR-580 and ATCC VR-1244; Ndumu virus, for example ATCC VR-371; Pixuna virus, for example ATCC VR-372 and ATCC VR-1245; Tonate virus, for example ATCC VR-925; Triniti virus, for example ATCC VR-469; Una virus, for example ATCC VR-374; Whataroa virus, for example ATCC VR-926; Y-62-33 virus, for example ATCC VR-375; O'Nyong virus, Eastern encephalitis virus, for example ATCC VR-65 and ATCC VR-1242; Western encephalitis virus, for example ATCC VR-70, ATCC VR-1251, ATCC VR-622 and ATCC VR-1252; and coronavirus, for example ATCC VR-740 and those described in Hamre (1966) Proc Soc Exp Biol Med 121:190.

[0198] Delivery of the compositions of this invention into cells is not limited to the above mentioned viral vectors. Other delivery methods and media may be employed such as, for example, nucleic acid expression vectors, polycationic condensed DNA linked or unlinked to killed adenovirus alone, for example see U.S. Ser. No. 08/366,787, filed Dec. 30, 1994 and Curiel (1992) Hum Gene Ther 3:147-154 ligand linked DNA, for example see Wu (1989) J Biol Chem 264:16985-16987, eucaryotic cell delivery vehicles cells, for example see U.S. Ser. No. 08/240,030, filed May 9, 1994, and U.S. Ser. No. 08/404,796, deposition of photopolymerized hydrogel materials, hand-held gene transfer particle gun, as described in U.S. Pat. No. 5,149,655, ionizing radiation as described in U.S. Pat. No. 5,206,152 and in WO92/11033, nucleic charge neutralization or fusion with cell membranes. Additional approaches are described in Philip (1994) Mol Cell Biol 14:2411-2418 and in Woffendin (1994) Proc Natl Acad Sci 91:1581-1585.

[0199] Particle mediated gene transfer may be employed, for example see U.S. Ser. No. 60/023,867. Briefly, the sequence can be inserted into conventional vectors that contain conventional control sequences for high level expression, and then incubated with synthetic gene transfer molecules such as polymeric DNA-binding cations like polylysine, protamine, and albumin, linked to cell targeting ligands such as asialoorosomucoid, as described in Wu & Wu (1987) J. Biol. Chem. 262:4429-4432, insulin as described in Hucked (1990) Biochem Pharmacol 40:253-263, galactose as described in Plank (1992) Bioconjugate Chem 3:533-539, lactose or transferrin.

[0200] Naked DNA may also be employed. Exemplary naked DNA introduction methods are described in WO 90/11092 and U.S. Pat. No. 5,580,859. Uptake efficiency may be improved using biodegradable latex beads. DNA coated latex beads are efficiently transported into cells after endocytosis initiation by the beads. The method may be improved further by treatment of the beads to increase hydrophobicity and thereby facilitate disruption of the endosome and release of the DNA into the cytoplasm.

[0201] Liposomes that can act as gene delivery vehicles are described in U.S. Pat. No. 5,422,120, WO95/13796, WO94/23697, WO91/14445 and EP-524,968. As described in U.S. Ser. No. 60/023,867, on non-viral delivery, the nucleic acid sequences encoding a polypeptide can be inserted into conventional vectors that contain conventional control sequences for high level expression, and then be incubated with synthetic gene transfer molecules such as polymeric DNA-binding cations like polylysine, protamine, and albumin, linked to cell targeting ligands such as asialoorosomucoid, insulin, galactose, lactose, or transferrin. Other delivery systems include the use of liposomes to encapsulate DNA comprising the gene under the control of a variety of tissue-specific or ubiquitously-active promoters. Further non-viral delivery suitable for use includes mechanical delivery systems such as the approach described in Woffendin et al (1994) Proc. Natl. Acad. Sci. USA 91(24):11581-11585. Moreover, the coding sequence and the product of expression of such can be delivered through deposition of photopolymerized hydrogel materials. Other conventional methods for gene delivery that can be used for delivery of the coding sequence include, for example, use of hand-held gene transfer particle gun, as described in U.S. Pat. No. 5,149,655; use of ionizing radiation for activating transferred gene, as described in U.S. Pat. No. 5,206,152 and WO92/11033

[0202] Exemplary liposome and polycationic gene delivery vehicles are those described in U.S. Pat. Nos. 5,422,120 and 4,762,915; in WO 95/13796; WO94/23697; and WO91/14445; in EP-0524968; and in Stryer, Biochemistry, pages 236-240 (1975) W.H. Freeman, San Francisco; Szoka (1980) Biochem Biophys Acta 600:1; Bayer (1979) Biochem Biophys Acta 550:464; Rivnay (1987) Meth Enzymol 149:119; Wang (1987) Proc Natl Acad Sci 84:7851; Plant (1989) Anal Biochem 176:420.

[0203] A polynucleotide composition can comprises therapeutically effective amount of a gene therapy vehicle, as the term is defined above. For purposes of the present invention, an effective dose will be from about 0.01 mg/kg to 50 mg/kg or 0.05 mg/kg to about 10 mg/kg of the DNA constructs in the individual to which it is administered.

Delivery Methods

[0204] Once formulated, the polynucleotide compositions of the invention can be administered (1) directly to the subject; (2) delivered ex vivo, to cells derived from the subject; or (3) in vitro for expression of recombinant proteins. The subjects to be treated can be mammals or birds. Also, human subjects can be treated.

[0205] Direct delivery of the compositions will generally be accomplished by injection, either subcutaneously, intraperitoneally, intravenously or intramuscularly or delivered to the interstitial space of a tissue. The compositions can also be administered into a lesion. Other modes of administration include oral and pulmonary administration, suppositories, and transdermal or transcutaneous applications (eg. see WO98/20734), needles, and gene guns or hyposprays. Dosage treatment may be a single dose schedule or a multiple dose schedule.

[0206] Methods for the ex vivo delivery and reimplantation of transformed cells into a subject are known in the art and described in eg. WO93/14778. Examples of cells useful in ex vivo applications include, for example, stem cells, particularly hematopoetic, lymph cells, macrophages, dendritic cells, or tumor cells.

[0207] Generally, delivery of nucleic acids for both ex vivo and in vitro applications can be accomplished by the following procedures, for example, dextran-mediated transfection, calcium phosphate precipitation, polybrene mediated transfection, protoplast fusion, electroporation, encapsulation of the polynucleotide(s) in liposomes, and direct microinjection of the DNA into nuclei, all well known in the art.

Polynucleotide and Polypeptide Pharmaceutical Compositions

[0208] In addition to the pharmaceutically acceptable carriers and salts described above, the following additional agents can be used with polynucleotide and/or polypeptide compositions.

A. Polypeptides

[0209] One example are polypeptides which include, without limitation: asioloorosomucoid (ASOR); transferrin; asialoglycoproteins; antibodies; antibody fragments; ferritin; interleukins; interferons, granulocyte, macrophage colony stimulating factor (GM-CSF), granulocyte colony stimulating factor (G-CSF), macrophage colony stimulating factor (M-CSF), stem cell factor and erythropoietin. Viral antigens, such as envelope proteins, can also be used. Also, proteins from other invasive organisms, such as the 17 amino acid peptide from the circumsporozoite protein of plasmodium falciparum known as RII.

B. Hormones, Vitamins, etc.

[0210] Other groups that can be included are, for example: hormones, steroids, androgens, estrogens, thyroid hormone, or vitamins, folic acid.

C. Polyalkylenes, Polysaccharides, etc.

[0211] Also, polyalkylene glycol can be included with the desired polynucleotides/polypeptides. In a preferred embodiment, the polyalkylene glycol is polyethlylene glycol. In addition, mono-, di-, or polysaccharides can be included. In a preferred embodiment of this aspect, the polysaccharide is dextran or DEAE-dextran. Also, chitosan and poly(lactide-co-glycolide)

D. Lipids, and Liposomes

[0212] The desired polynucleotide/polypeptide can also be encapsulated in lipids or packaged in liposomes prior to delivery to the subject or to cells derived therefrom.

[0213] Lipid encapsulation is generally accomplished using liposomes which are able to stably bind or entrap and retain nucleic acid. The ratio of condensed polynucleotide to lipid preparation can vary but will generally be around 1:1 (mg DNA:micromoles lipid), or more of lipid. For a review of the use of liposomes as carriers for delivery of nucleic acids, see, Hug and Sleight (1991) Biochim. Biophys. Acta. 1097:1-17; Straubinger (1983) Meth. Enzymol. 101:512-527.

[0214] Liposomal preparations for use in the present invention include cationic (positively charged), anionic (negatively charged) and neutral preparations. Cationic liposomes have been shown to mediate intracellular delivery of plasmid DNA (Felgner (1987) Proc. Natl. Acad. Sci. USA 84:7413-7416); mRNA (Malone (1989) Proc. Natl. Acad. Sci. USA 86:6077-6081); and purified transcription factors (Debs (1990) J. Biol. Chem. 265:10189-10192), in functional form.

[0215] Cationic liposomes are readily available. For example, N[1-2,3-dioleyloxy)propyl]-N,N,N-triethylammonium (DOTMA) liposomes are available under the trademark Lipofectin, from GIBCO BRL, Grand Island, N.Y. (See, also, Felgner supra). Other commercially available liposomes include transfectace (DDAB/DOPE) and DOTAP/DOPE (Boerhinger). Other cationic liposomes can be prepared from readily available materials using techniques well known in the art. See, eg. Szoka (1978) Proc. Natl. Acad. Sci. USA 75:4194-4198; WO90/11092 for a description of the synthesis of DOTAP (1,2-bis(oleoyloxy)-3-(trimethylammonio)propane)liposomes.

[0216] Similarly, anionic and neutral liposomes are readily available, such as from Avanti Polar Lipids (Birmingham, Ala.), or can be easily prepared using readily available materials. Such materials include phosphatidyl choline, cholesterol, phosphatidyl ethanolamine, dioleoylphosphatidyl choline (DOPC), dioleoylphosphatidyl glycerol (DOPG), dioleoylphoshatidyl ethanolamine (DOPE), among others. These materials can also be mixed with the DOTMA and DOTAP starting materials in appropriate ratios. Methods for making liposomes using these materials are well known in the art.

[0217] The liposomes can comprise multilammelar vesicles (MLVs), small unilamellar vesicles (SUVs), or large unilamellar vesicles (LUVs). The various liposome-nucleic acid complexes are prepared using methods known in the art. See eg. Straubinger (1983) Meth. Immunol. 101:512-527; Szoka (1978) Proc. Natl. Acad. Sci. USA 75:4194-4198; Papahadjopoulos (1975) Biochim. Biophys. Acta 394:483; Wilson (1979) Cell 17:77); Deamer & Bangham (1976) Biochim. Biophys. Acta 443:629; Ostro (1977) Biochem. Biophys. Res. Commun. 76:836; Fraley (1979) Proc. Natl. Acad. Sci. USA 76:3348); Enoch & Strittmatter (1979) Proc. Natl. Acad. Sci. USA 76:145; Fraley (1980) J. Biol. Chem. (1980) 255:10431; Szoka & Papahadjopoulos (1978) Proc. Natl. Acad. Sci. USA 75:145; and Schaefer-Ridder (1982) Science 215:166.

E. Lipoproteins

[0218] In addition, lipoproteins can be included with the polynucleotide/polypeptide to be delivered. Examples of lipoproteins to be utilized include: chylomicrons, HDL, IDL, LDL, and VLDL. Mutants, fragments, or fusions of these proteins can also be used. Also, modifications of naturally occurring lipoproteins can be used, such as acetylated LDL. These lipoproteins can target the delivery of polynucleotides to cells expressing lipoprotein receptors. Preferably, if lipoproteins are including with the polynucleotide to be delivered, no other targeting ligand is included in the composition.

[0219] Naturally occurring lipoproteins comprise a lipid and a protein portion. The protein portion are known as apoproteins. At the present, apoproteins A, B, C, D, and E have been isolated and identified. At least two of these contain several proteins, designated by Roman numerals, AI, AII, AIV; CI, CII, CIII.

[0220] A lipoprotein can comprise more than one apoprotein. For example, naturally occurring chylomicrons comprises of A, B, C & E, over time these lipoproteins lose A and acquire C & E. VLDL comprises A, B, C & E apoproteins, LDL comprises apoprotein B; and HDL comprises apoproteins A, C, & E.

[0221] The amino acid of these apoproteins are known and are described in, for example, Breslow (1985) Annu Rev. Biochem 54:699; Law (1986) Adv. Exp Med. Biol. 151:162; Chen (1986) J Biol Chem 261:12918; Kane (1980) Proc Natl Acad Sci USA 77:2465; and Utermann (1984) Hum Genet 65:232.

[0222] Lipoproteins contain a variety of lipids including, triglycerides, cholesterol (free and esters), and phospholipids. The composition of the lipids varies in naturally occurring lipoproteins. For example, chylomicrons comprise mainly triglycerides. A more detailed description of the lipid content of naturally occurring lipoproteins can be found, for example, in Meth. Enzymol. 128 (1986). The composition of the lipids are chosen to aid in conformation of the apoprotein for receptor binding activity. The composition of lipids can also be chosen to facilitate hydrophobic interaction and association with the polynucleotide binding molecule.

[0223] Naturally occurring lipoproteins can be isolated from serum by ultracentrifugation, for instance. Such methods are described in Meth. Enzymol. (supra); Pitas (1980) J. Biochem. 255:5454-5460 and Mahey (1979) J. Clin. Invest 64:743-750. Lipoproteins can also be produced by in vitro or recombinant methods by expression of the apoprotein genes in a desired host cell. See, for example, Atkinson (1986) Annu Rev Biophys Chem 15:403 and Radding (1958) Biochim Biophys Acta 30: 443. Lipoproteins can also be purchased from commercial suppliers, such as Biomedical Techniologies, Inc., Stoughton, Mass., USA. Further description of lipoproteins can be found in WO98/06437.

F. Polycationic Agents

[0224] Polycationic agents can be included, with or without lipoprotein, in a composition with the desired polynucleotide/polypeptide to be delivered.

[0225] Polycationic agents, typically, exhibit a net positive charge at physiological relevant pH and are capable of neutralizing the electrical charge of nucleic acids to facilitate delivery to a desired location. These agents have both in vitro, ex vivo, and in vivo applications. Polycationic agents can be used to deliver nucleic acids to a living subject either intramuscularly, subcutaneously, etc.

[0226] The following are examples of useful polypeptides as polycationic agents: polylysine, polyarginine, polyornithine, and protamine. Other examples include histones, protamines, human serum albumin, DNA binding proteins, non-histone chromosomal proteins, coat proteins from DNA viruses, such as (X174, transcriptional factors also contain domains that bind DNA and therefore may be useful as nucleic aid condensing agents. Briefly, transcriptional factors such as C/CEBP, c-jun, c-fos, AP-1, AP-2, AP-3, CPF, Prot-1, Sp-1, Oct-1, Oct-2, CREP, and TFIID contain basic domains that bind DNA sequences.

[0227] Organic polycationic agents include: spermine, spermidine, and purtrescine.

[0228] The dimensions and of the physical properties of a polycationic agent can be extrapolated from the list above, to construct other polypeptide polycationic agents or to produce synthetic polycationic agents.

[0229] Synthetic polycationic agents which are useful include, for example, DEAE-dextran, polybrene. Lipofectin™, and lipofectAMINE™ are monomers that form polycationic complexes when combined with polynucleotides/polypeptides.

Immunodiagnostic Assays

[0230] Streptococcus antigens of the invention can be used in immunoassays to detect antibody levels (or, conversely, anti-streptococcus antibodies can be used to detect antigen levels). Immunoassays based on well defined, recombinant antigens can be developed to replace invasive diagnostics methods. Antibodies to streptococcus proteins within biological samples, including for example, blood or serum samples, can be detected. Design of the immunoassays is subject to a great deal of variation, and a variety of these are known in the art. Protocols for the immunoassay may be based, for example, upon competition, or direct reaction, or sandwich type assays. Protocols may also, for example, use solid supports, or may be by immunoprecipitation. Most assays involve the use of labeled antibody or polypeptide; the labels may be, for example, fluorescent, chemiluminescent, radioactive, or dye molecules. Assays which amplify the signals from the probe are also known; examples of which are assays which utilize biotin and avidin, and enzyme-labeled and mediated immunoassays, such as ELISA assays.

[0231] Kits suitable for immunodiagnosis and containing the appropriate labeled reagents are constructed by packaging the appropriate materials, including the compositions of the invention, in suitable containers, along with the remaining reagents and materials (for example, suitable buffers, salt solutions, etc.) required for the conduct of the assay, as well as suitable set of assay instructions.

Nucleic Acid Hybridisation

[0232] “Hybridization” refers to the association of two nucleic acid sequences to one another by hydrogen bonding. Typically, one sequence will be fixed to a solid support and the other will be free in solution. Then, the two sequences will be placed in contact with one another under conditions that favor hydrogen bonding. Factors that affect this bonding include: the type and volume of solvent; reaction temperature; time of hybridization; agitation; agents to block the non-specific attachment of the liquid phase sequence to the solid support (Denhardt's reagent or BLOTTO); concentration of the sequences; use of compounds to increase the rate of association of sequences (dextran sulfate or polyethylene glycol); and the stringency of the washing conditions following hybridization. See Sambrook et al. [supra] Volume 2, chapter 9, pages 9.47 to 9.57.

[0233] “Stringency” refers to conditions in a hybridization reaction that favor association of very similar sequences over sequences that differ. For example, the combination of temperature and salt concentration should be chosen that is approximately 120 to 200° C. below the calculated Tm of the hybrid under study. The temperature and salt conditions can often be determined empirically in preliminary experiments in which samples of genomic DNA immobilized on filters are hybridized to the sequence of interest and then washed under conditions of different stringencies. See Sambrook et al. at page 9.50.

[0234] Variables to consider when performing, for example, a Southern blot are (1) the complexity of the DNA being blotted and (2) the homology between the probe and the sequences being detected. The total amount of the fragment(s) to be studied can vary a magnitude of 10, from 0.1 to 1 μg for a plasmid or phage digest to 10⁻⁹ to 10⁻⁸ g for a single copy gene in a highly complex eukaryotic genome. For lower complexity polynucleotides, substantially shorter blotting, hybridization, and exposure times, a smaller amount of starting polynucleotides, and lower specific activity of probes can be used. For example, a single-copy yeast gene can be detected with an exposure time of only 1 hour starting with 1 μg of yeast DNA, blotting for two hours, and hybridizing for 4-8 hours with a probe of 10⁸ cpm/μg. For a single-copy mammalian gene a conservative approach would start with 10 μg of DNA, blot overnight, and hybridize overnight in the presence of 10% dextran sulfate using a probe of greater than 10⁸ cpm/μg, resulting in an exposure time of ˜24 hours.

[0235] Several factors can affect the melting temperature (Tm) of a DNA-DNA hybrid between the probe and the fragment of interest, and consequently, the appropriate conditions for hybridization and washing. In many cases the probe is not 100% homologous to the fragment. Other commonly encountered variables include the length and total G+C content of the hybridizing sequences and the ionic strength and formamide content of the hybridization buffer. The effects of all of these factors can be approximated by a single equation:
Tₘ=81+16.6(log₁₀Ci)+0.4[% (G+C)]−0.6(% formamide)−600/n−1.5(% mismatch).
where Ci is the salt concentration (monovalent ions) and n is the length of the hybrid in base pairs (slightly modified from Meinkoth & Wahl (1984) Anal. Biochem. 138: 267-284).

[0236] In designing a hybridization experiment, some factors affecting nucleic acid hybridization can be conveniently altered. The temperature of the hybridization and washes and the salt concentration during the washes are the simplest to adjust. As the temperature of the hybridization increases (ie. stringency), it becomes less likely for hybridization to occur between strands that are nonhomologous, and as a result, background decreases. If the radiolabeled probe is not completely homologous with the immobilized fragment (as is frequently the case in gene family and interspecies hybridization experiments), the hybridization temperature must be reduced, and background will increase. The temperature of the washes affects the intensity of the hybridizing band and the degree of background in a similar manner. The stringency of the washes is also increased with decreasing salt concentrations.

[0237] In general, convenient hybridization temperatures in the presence of 50% formamide are 42° C. for a probe with is 95% to 100% homologous to the target fragment, 37° C. for 90% to 95% homology, and 32° C. for 85% to 90% homology. For lower homologies, formamide content should be lowered and temperature adjusted accordingly, using the equation above. If the homology between the probe and the target fragment are not known, the simplest approach is to start with both hybridization and wash conditions which are nonstringent. If non-specific bands or high background are observed after autoradiography, the filter can be washed at high stringency and reexposed. If the time required for exposure makes this approach impractical, several hybridization and/or washing stringencies should be tested in parallel.

Nucleic Acid Probe Assays

[0238] Methods such as PCR, branched DNA probe assays, or blotting techniques utilizing nucleic acid probes according to the invention can determine the presence of cDNA or mRNA. A probe is said to “hybridize” with a sequence of the invention if it can form a duplex or double stranded complex, which is stable enough to be detected.

[0239] The nucleic acid probes will hybridize to the streptococcus nucleotide sequences of the invention (including both sense and antisense strands). Though many different nucleotide sequences will encode the amino acid sequence, the native streptococcus sequence is preferred because it is the actual sequence present in cells. mRNA represents a coding sequence and so a probe should be complementary to the coding sequence; single-stranded cDNA is complementary to mRNA, and so a cDNA probe should be complementary to the non-coding sequence.

[0240] The probe sequence need not be identical to the streptococcus sequence (or its complement)—some variation in the sequence and length can lead to increased assay sensitivity if the nucleic acid probe can form a duplex with target nucleotides, which can be detected. Also, the nucleic acid probe can include additional nucleotides to stabilize the formed duplex. Additional streptococcus sequence may also be helpful as a label to detect the formed duplex. For example, a non-complementary nucleotide sequence may be attached to the 5′ end of the probe, with the remainder of the probe sequence being complementary to a streptococcus sequence. Alternatively, non-complementary bases or longer sequences can be interspersed into the probe, provided that the probe sequence has sufficient complementarity with the a streptococcus sequence in order to hybridize therewith and thereby form a duplex which can be detected.

[0241] The exact length and sequence of the probe will depend on the hybridization conditions (e.g. temperature, salt condition etc.). For example, for diagnostic applications, depending on the complexity of the analyte sequence, the nucleic acid probe typically contains at least 10-20 nucleotides, preferably 15-25, and more preferably at least 30 nucleotides, although it may be shorter than this. Short primers generally require cooler temperatures to form sufficiently stable hybrid complexes with the template.

[0242] Probes may be produced by synthetic procedures, such as the triester method of Matteucci et al. [J. Am. Chem. Soc. (1981) 103:3185], or according to Urdea et al. [Proc. Natl. Acad. Sci. USA (1983) 80: 7461], or using commercially available automated oligonucleotide synthesizers.

[0243] The chemical nature of the probe can be selected according to preference. For certain applications, DNA or RNA are appropriate. For other applications, modifications may be incorporated eg. backbone modifications, such as phosphorothioates or methylphosphonates, can be used to increase in vivo half-life, alter RNA affinity, increase nuclease resistance etc. [eg. see Agrawal & Iyer (1995) Curr Opin Biotechnol 6:12-19; Agrawal (1996) TIBTECH 14:376-387]; analogues such as peptide nucleic acids may also be used [eg. see Corey (1997) TIBTECH 15:224-229; Buchardt et al. (1993) TIBTECH 11:384-386].

[0244] Alternatively, the polymerase chain reaction (PCR) is another well-known means for detecting small amounts of target nucleic acid. The assay is described in Mullis et al. [Meth. Enzymol. (1987) 155:335-350] & U.S. Pat. Nos. 4,683,195 & 4,683,202. Two “primer” nucleotides hybridize with the target nucleic acids and are used to prime the reaction. The primers can comprise sequence that does not hybridize to the sequence of the amplification target (or its complement) to aid with duplex stability or, for example, to incorporate a convenient restriction site. Typically, such sequence will flank the desired streptococcus sequence.

[0245] A thermostable polymerase creates copies of target nucleic acids from the primers using the original target nucleic acids as a template. After a threshold amount of target nucleic acids are generated by the polymerase, they can be detected by more traditional methods, such as Southern blots. When using the Southern blot method, the labelled probe will hybridize to the streptococcus sequence (or its complement).

[0246] Also, mRNA or cDNA can be detected by traditional blotting techniques described in Sambrook et al [supra]. mRNA, or cDNA generated from mRNA using a polymerase enzyme, can be purified and separated using gel electrophoresis. The nucleic acids on the gel are then blotted onto a solid support, such as nitrocellulose. The solid support is exposed to a labelled probe and then washed to remove any unhybridized probe. Next, the duplexes containing the labeled probe are detected. Typically, the probe is labelled with a radioactive moiety.

### BRIEF DESCRIPTION OF DRAWINGS

[0247] There are no drawings.

### MODES FOR CARRYING OUT THE INVENTION

[0248] The following examples describe nucleic acid and/or amino acid sequences which have been identified in GAS or GBS, along with their inferred translation products.

[0249] Details of the examples are as follows:
[0250] Examples 1 to 29 describe variants of GBS sequences from WO02/34771, with PSORT analysis of the translation products.
[0251] Examples 30 to 117 describe GBS sequences not disclosed in WO02/34771, with PSORT analysis of the translation products.
[0252] Examples 118 to 152 describe GAS sequences not disclosed by Ferretti et al.
[0253] Example 153 describes a GAS sequence shorter than the Ferretti et al. sequence.
[0254] Examples 154 to 173 describe GAS sequences longer than the Ferretti et al. sequences.
[0255] Examples 174 to 176 describe GAS sequences from the Ferretti et al. genome and which are predicted to be antigenic.
[0256] Examples 177 to 674 describe GAS sequences.
[0257] Examples 675 to 686 describe GBS sequences.

[0258] GBS sequences are from a serotype V clinical strain isolated in Italy which expresses the R antigen (ISS/Rome/Italy collection, strain 2603 V/R; SEQ ID 1373). GAS sequences are from strain SF370 (ATCC 700294).

[0259] Various tests can be used to assess the in vivo immunogenicity of the proteins identified in the examples. For example, the proteins can be expressed recombinantly and used to screen patient sera by immunoblot. A positive reaction between the protein and patient serum indicates that the patient has previously mounted an immune response to the protein in question i.e. the protein is an immunogen. This method can also be used to identify immunodominant proteins. The mouse model used in the examples can also be used.

[0260] The recombinant protein can also be conveniently used to prepare antibodies e.g. in a mouse. These can be used for direct confirmation that a protein is located on the cell-surface. Labelled antibody (e.g. fluorescent labelling for FACS) can be incubated with intact bacteria and the presence of label on the bacterial surface confirms the location of the protein.

[0261] Details of experimental techniques which have been used for GBS coding sequence identification, expression, purification and characterisation are presented below:

Sequence Analysis

[0262] Open reading frames (ORFs) within nucleotide sequences were predicted using the GLIMMER program [Salzberg et al. (1998) Nucleic Acids Res 26:544-8]. Where necessary, start codons were modified and corrected manually on the basis of the presence of ribosome-binding sites and promoter regions on the upstream DNA sequence.

[0263] Leader peptides within the ORFs were located using three different approaches: (i) PSORT [Nakai (1991) Bull. Inst. Chem. Res., Kyoto Univ. 69:269-291; Horton & Nakai (1996) Intellig. Syst. Mol. Biol. 4:109-115; Horton & Nakai (1997) Intellig. Syst. Mol. Biol. 5:147-152]; (ii) SignalP [Nielsen & Krogh (1998) in Proceedings of the Sixth International Conference on Intelligent Systems for Molecular Biology (ISMB 6), AAAI Press, Menlo Park, Calif., pp. 122-130; Nielsen et al. (1999) Protein Engineering 12:3-9; Nielsen et al. (1997). Int. J. Neural Sys. 8:581-599]; and (iii) visual inspection of the ORF sequences. Where a signal sequences is given a “possible site” value, the value represents the C-terminus residue of the signal peptide e.g. a “possible site” of 26 means that the signal sequence consists of amino acids 1-26.

[0264] Lipoprotein-specific signal peptides were located using three different approaches: (i) PSORT [see above]; (ii) the “prokaryotic membrane lipoprotein lipid attachment site” PROSITE motif [Hofmann et al. (1999) Nucleic Acids Res. 27:215-219; Bucher & Bairoch (1994) in Proceedings 2nd International Conference on Intelligent Systems for Molecular Biology (ISMB-94), AAAI Press, pages 53-61]; and (iii) the FINDPATTERNS program available in the GCG Wisconsin Package, using the pattern (M,L,V)x{9, 35}LxxCx.

[0265] Transmembrane domains were located using two approaches: (i) PSORT [see above]; (ii) TopPred [von Heijne (1992) J. Mol. Biol. 225:487-494].

[0266] LPXTG motifs, characteristic of cell-wall attached proteins in Gram-positive bacteria [Fischetti et al. (1990) Mol Microbiol 4:1603-5] were located with FINDPATTERNS using the pattern (L,I,V,M,Y,F)Px(T,A,S,G) (G,N,S,T,A,L).

[0267] RGD motifs, characteristic of cell-adhesion molecules [D'Souza et al. (1991) Trends Biochem Sci 16:246-50] were located using FINDPATTERNS.

[0268] Enzymes belonging to the glycolytic pathway were also selected as antigens, because these have been found experimentally expressed on the surface of Streptococci [e.g. Pancholi & Fischetti (1992) J Exp Med 176:415-26; Pancholi & Fischetti (1998) J Biol Chem 273:14503-15].

Cloning, Expression and Purification of Proteins

[0269] GBS genes were cloned to facilitate expression in E. coli as two different types of fusion proteins:
[0270] a) proteins having a hexa-histidine tag at the amino-terminus (His-gbs)
[0271] b) proteins having a GST fusion partner at the amino-terminus (Gst-gbs)

[0272] Cloning was performed using the Gateway™ technology (Life Technologies), which is based on the site-specific recombination reactions that mediate integration and excision of phage lambda into and from the E. coli genome. A single cloning experiment included the following steps:
[0273] 1—Amplification of GBS chromosomal DNA to obtain a PCR product coding for a single ORF flanked by attB recombination sites.
[0274] 2—Insertion of the PCR product into a pDONR vector (containing attP sites) through a BP reaction (atiB×atiP sites). This reaction gives a so called ‘pEntry’ vector, which now contains attL sites flanking the insert.
[0275] 3—Insertion of the GBS gene into E. coli expression vectors (pDestination vectors, containing attR sites) through a LR reaction between pEntry and pDestination plasmids (attL×attR sites).
   A) Chromosomal DNA Preparation

[0276] For chromosomal DNA preparation, GBS strain 2603 V/R (Istituto Superiore Sanità, Rome) was grown to exponential phase in 2 litres TH Broth (Difco) at 37° C., harvested by centrifugation, and dissolved in 40 ml TES (50 mM Tris pH 8, 5 mM EDTA pH 8, 20% sucrose). After addition of 2.5 ml lysozyme solution (25 mg/ml in TES) and 0.5 ml mutanolysin (Sigma M-9901, 25000 U/ml in H₂O), the suspension was incubated at 37° C. for 1 hour. 1 ml RNase (20 mg/ml) and 0.1 ml proteinase K (20 mg/ml) were added and incubation was continued for 30 min. at 37° C.

[0277] Cell lysis was obtained by adding 5 ml sarkosyl solution (10% N-laurylsarcosine in 250 mM EDTA pH 8.0), and incubating 1 hour at 37° C. with frequent inversion. After sequential extraction with phenol, phenol-chloroform and chloroform, DNA was precipitated with 0.3M sodium acetate pH 5.2 and 2 volumes of absolute ethanol. The DNA pellet was rinsed with 70% ethanol and dissolved in TE buffer (10 mM Tris-HCl, 1 mM EDTA, pH 8). DNA concentration was evaluated by OD₂₆₀.

B) Oligonucleotide Design

[0278] Synthetic oligonucleotide primers were designed on the basis of the coding sequence of each ORF. The aim was to express the protein's extracellular region. Accordingly, predicted signal peptides were omitted (by deducing the 5′ end amplification primer sequence immediately downstream from the predicted leader sequence) and C-terminal cell-wall ancoring regions were removed (e.g. LPXTG motifs and downstream amino acids). Where additional nucleotides have been deleted, this is indicated by the suffix ‘d’ (e.g. ‘GBS352d’—see Table V). Conversely, a suffix ‘L’ refers to expression without these deletions. Deletions of C- or N-terminal residues were also sometimes made, as indicated by a ‘C’ or ‘N’ suffix.

[0279] The amino acid sequences of the expressed GBS proteins (including ‘d’ and ‘L’ forms etc.) are definitively defined by the sequences of the oligonuclotide primers given in Table II.

[0280] 5′ tails of forward primers and 3′ tails of reverse primers included attB1 and attB2 sites respectively:

[0281] Forward primers: 5′-GGGGACAAGTTTGTACAAAAAAGCAGGCTCT-ORF in frame-3′ (the TCT sequence preceding the ORF was omitted when the ORF's first coding triplet began with T).

[0282] Reverse primers: 5′-GGGGACCACTTTGTACAAGAAAGCTGGGTT-ORF reverse complement-3′.

[0283] The number of nucleotides which hybridized to the sequence to be amplified depended on the melting temperature of the primers, which was determined as described by Breslauer et al. [PNAS USA (1986) 83:3746-50]. The average melting temperature of the selected oligos was 50-55° C. for the hybridizing region and 80-85° C. for the whole oligos.

C) Amplification

[0284] The standard PCR protocol was as follows: 50 ng genomic DNA were used as template in the presence of 0.5 μM each primer, 200 μM each dNTP, 1.5 mM MgCl₂, 1× buffer minus Mg⁺⁺ (Gibco-BRL) and 2 units of Taq DNA polymerase (Platinum Taq, Gibco-BRL) in a final volume of 100 μl. Each sample underwent a double-step of amplification: 5 cycles performed using as the hybridizing temperature 50° C., followed by 25 cycles at 68° C.

[0285] The standard cycles were as follows:

| | |
|---|---|
| | Denaturation: 94° C., 2 min |
| 5 cycles: | Denaturation: 94° C., 30 seconds |
| | Hybridization: 50° C., 50 seconds |
| | Elongation: 72° C., 1 min. or 2 min. and 40 sec. |
| 25 cycles: | Denaturation: 94° C., 30 seconds |
| | Hybridization: 68° C., 50 seconds |
| | Elongation: 72° C., 1 min. or 2 min. and 40 sec. |

[0286] Elongation time was 1 minute for ORFs shorter than 2000 bp and 2:40 minutes for ORFs longer than 2000 bp. Amplifications were performed using a Gene Amp PCR system 9600 (Perkin Elmer).

[0287] To check amplification results, 2 μl of each PCR product were loaded onto 1-1.5 agarose gel and the size of amplified fragments was compared with DNA molecular weight standards (DNA marker IX Roche, 1 kb DNA ladder Biolabs).

[0288] Single band PCR products were purified by PEG precipitation: 300 μl of TE buffer and 200 μl of 30% PEG 8000/30 mM MgCl₂ were added to 100 μl PCR reaction. After vortexing, the DNA was centrifuged for 20 min at 10000 g, washed with 1 vol. 70% ethanol and the pellet dissolved in 30 μl TE. PCR products smaller than 350 bp were purified using a PCR purification Kit (Qiagen) and eluted with 30 μl of the provided elution buffer.

[0289] In order to evaluate the yield, 2 μl of the purified DNA were subjected to agarose gel electrophoresis and compared to titrated molecular weight standards.

D) Cloning of PCR Products into Expression Vectors

[0290] Cloning was performed following the Gateway™ technology's “one-tube protocol”, which consists of a two step reaction (BP and LR) for direct insertion of PCR products into expression vectors.

[0291] BP reaction (attB×attP sites): The reaction allowed insertion of the PCR product into a pDONR vector. The pDONR™ 201 vector we used contains the killer toxin gene ccdB between attP1 and attP2 sites to minimize background colonies lacking the PCR insert, and a selectable marker gene for kanamycin resitance. The reaction resulted in a so called pEntry vector, in which the GBS gene was located between attL1 and attL2 sites.

[0292] 60 fmol of PCR product and 100 ng of pDONR™ 201 vector were incubated with 2.5 μl of BP clonase™ in a final volume of 12.5 μl for 4 hours at 25° C.

[0293] LR reaction (attL×attR sites): The reaction allowed the insertion of the GBS gene, now present in the pEntry vector, into E. coli expression vectors (pDestination vectors, containing attR sites). Two pDestination vectors were used (pDEST15 for N-terminal GST fusions—FIG. 86; and pDEST17-1 for N-terminal His-tagged fusions—FIG. 87). Both allow transcription of the ORF fusion coding mRNA under T7 RNA polymerase promoter [Studier et al (1990) Meth. Enzymol 185: 60ff].

[0294] To 5 μl of BP reaction were added 0.25 μl of 0.75 M NaCl, 100 ng of destination vector and 1.5 μl of LR clonase™. The reaction was incubated at 25° C. for 2 hours and stopped with 1 μl of 1 mg/ml proteinase K solution at 37° C. for 15 min.

[0295] 1 μl of the completed reaction was used to transform 50 μl electrocompetent BL21-SI™ cells (0.1 cm, 200 ohms, 25 μF). BL21-SI cells contain an integrated T7 RNA polymerase gene under the control of the salt-inducible prU promoter [Gowrishankar (1985) J. Bacteriol. 164:434ff]. After electroporation cells were diluted in 1 ml SOC medium (20 g/l bacto-tryptone, 5 g/l yeast extract, 0.58 g/l NaCl, 0.186 g/l KCl, 20 mM glucose, 10 mM MgCl₂) and incubated at 37° C. for 1 hour. 200 μl cells were plated onto LBON plates (Luria Broth medium without NaCl) containing 100 μg/ml ampicillin. Plates were then incubated for 16 hours at 37° C.

[0296] Entry clones: In order to allow the future preparation of Gateway compatible pEntry plasmids containing genes which might turn out of interest after immunological assays, 2.5 μl of BP reaction were incubated for 15 min in the presence of 3 μl 0.15 mg/ml proteinase K solution and then kept at −20° C. The reaction was in this way available to transform E. coli competent cells so as to produce Entry clones for future introduction of the genes in other Destination vectors.

E) Protein Expression

[0297] Single colonies derived from the transformation of LR reactions were inoculated as small-scale cultures in 3 ml LBON 100 μg/ml ampicillin for overnight growth at 25° C. 50-200 μl of the culture was inoculated in 3 ml LBON/Amp to an initial OD600 of 0.1. The cultures were grown at 37° C. until OD600 0.4-0.6 and recombinant protein expression was induced by adding NaCl to a final concentration of 0.3 M. After 2 hour incubation the final OD was checked and the cultures were cooled on ice. 0.5 OD₆₀₀ of cells were harvested by centrifugation. The cell pellet was suspended in 50 μl of protein Loading Sample Buffer (50 mM TRIS-HCl pH 6.8, 0.5% w/v SDS, 2.5% v/v glycerin, 0.05% w/v Bromophenol Blue, 100 mM DTT) and incubated at 100° C. for 5 min. 10 μl of sample was analyzed by SDS-PAGE and Coomassie Blue staining to verify the presence of induced protein band.

F) Purification of the Recombinant Proteins

[0298] Single colonies were inoculated in 25 ml LBON 100 μg/ml ampicillin and grown at 25° C. overnight. The overnight culture was inoculated in 500 ml LBON/amp and grown under shaking at 25° C. until OD₆₀₀ values of 0.4-0.6. Protein expression was then induced by adding NaCl to a final concentration of 0.3 M. After 3 hours incubation at 25° C. the final OD₆₀₀ was checked and the cultures were cooled on ice. After centrifugation at 6000 rpm (JA10 rotor, Beckman) for 20 min., the cell pellet was processed for purification or frozen at −20° C.

[0299] Proteins were purified in 1 of 3 ways depending on the fusion partner and the protein's solubility:

Purification of Soluble His-Tagged Proteins from E. coli

[0300] 1. Transfer pellets from −20° C. to ice bath and reconstitute each pellet with 10 ml B-PER™ solution (Bacterial-Protein Extraction Reagent, Pierce cat. 78266), 10 μl of a 100 mM MgCl₂ solution, 50 μl of DNAse I (Sigma D-4263, 100 Kunits in PBS) and 100 μl of 100 mg/ml lysozyme in PBS (Sigma L-7651, final concentration 1 mg/ml).
[0301] 2. Transfer resuspended pellets in 50 ml centrifuge tubes and leave at room temperature for 30-40 minutes, vortexing 3-4 times.
[0302] 3. Centrifuge 15-20 minutes at about 30-40000×g.
[0303] 4. Prepare Poly-Prep (Bio-Rad) columns containing 1 ml of Fast Flow Ni-activated Chelating Sepharose (Pharmacia). Equilibrate with 50 mM phosphate buffer, 300 mM NaCl, pH 8.0.
[0304] 5. Store the pellet at −20° C., and load the supernatant on to the columns.
[0305] 6. Discard the flow through.
[0306] 7. Wash with 10 ml 20 mM imidazole buffer, 50 mM phosphate, 300 mM NaCl, pH 8.0.
[0307] 8. Elute the proteins bound to the columns with 4.5 ml (1.5 ml+1.5 ml+1.5 ml) 250 mM imidazole buffer, 50 mM phosphate, 300 mM NaCl, pH 8.0 and collect three fractions of ˜1.5 ml each. Add to each tube 15 μl DTT 200 mM (final concentration 2 mM).
[0308] 9. Measure the protein concentration of the collected fractions with the Bradford method and analyse the proteins by SDS-PAGE.
[0309] 10. Store the collected fractions at +4° C. while waiting for the results of the SDS-PAGE analysis.
[0310] 11. For immunisation prepare 4-5 aliquots of 20-100 μg each in 0.5 ml in 40% glycerol. The dilution buffer is the above elution buffer, plus 2 mM DTT. Store the aliquots at −20° C. until immunisation.
   Purification of His-Tagged Proteins from Inclusion Bodies
[0311] 1. Bacteria are collected from 500 ml cultures by centrifugation. If required store bacterial pellets at −20° C. Transfer the pellets from −20° C. to room temperature and reconstitute each pellet with 10 ml B-PER™ solution, 10 μl of a 100 mM MgCl₂ solution (final 1 mM), 50 μl of DNAse 1 equivalent to 100 Kunits units in PBS and 100 μl of a 100 mg/ml lysozime (Sigma L-7651) solution in PBS (equivalent to 10 mg, final concentration 1 mg/ml).
[0312] 2. Transfer the resuspended pellets in 50 ml centrifuge tubes and let at room temperature for 30-40 minutes, vortexing 3-4 times.
[0313] 3. Centrifuge 15 minutes at 30-4000×g and collect the pellets.
[0314] 4. Dissolve the pellets with 50 mM TRIS-HCl, 1 mM TCEP {Tris(2-carboxyethyl)-phosphine hydrochloride, Pierce}, 6M guanidine hydrochloride, pH 8.5. Stir for ˜10 min. with a magnetic bar.
[0315] 5. Centrifuge as described above, and collect the supernatant.
[0316] 6. Prepare Poly-Prep (Bio-Rad) columns containing 1 ml of Fast Flow Ni-activated Chelating Sepharose (Pharmacia). Wash the columns twice with 5 ml of H₂O and equilibrate with 50 mM TRIS-HCl, 1 mM TCEP, 6M guanidine hydrochloride, pH 8.5
[0317] 7. Load the supernatants from step 5 onto the columns, and wash with 5 ml of 50 mM TRIS-HCl buffer, 1 mM TCEP, 6M urea, pH 8.5
[0318] 8. Wash the columns with 10 ml of 20 mM imidazole, 50 mM TRIS-HCl, 6M urea, 1 mM TCEP, pH 8.5. Collect and set aside the first 5 ml for possible further controls.
[0319] 9. Elute proteins bound to columns with 4.5 ml buffer containing 250 mM imidazole, 50 mM TRIS-HCl, 6M urea, 1 mM TCEP, pH 8.5. Add the elution buffer in three 1.5 ml aliquots, and collect the corresponding three fractions. Add to each fraction 15 μl DTT (final concentration 2 mM).
[0320] 10. Measure eluted protein concentration with Bradford method and analyse proteins by SDS-PAGE.
[0321] 11. Dialyse overnight the selected fraction against 50 mM Na phosphate buffer, pH 8.8, containing 10% glycerol, 0.5 M arginine, 5 mM reduced glutathione, 0.5 mM oxidized glutathione, 2 M urea.
[0322] 12. Dialyse against 50 mM Na phosphate buffer, pH 8.8, containing 10% glycerol, 0.5 M arginine, 5 mM reduced glutathione, 0.5 mM oxidized glutathione.
[0323] 13. Clarify the dialysed protein preparation by centrifugation and discard the non-soluble material and measure the protein concentration with the Bradford method.
[0324] 14. For each protein destined to the immunization prepare 4-5 aliquot of 20-100 μg each in 0.5 ml after having adjusted the glycerol content up to 40%. Store the prepared aliquots at −20° C. until immunization.
   Purification of GST-Fusion Proteins from E. coli
[0325] 1. Bacteria are collected from 500 ml cultures by centrifugation. If required store bacterial pellets at −20° C. Transfer the pellets from −20° C. to room temperature and reconstitute each pellet with 10 ml B-PER™ solution, 10 μl of a 100 mM MgCl₂ solution (final 1 mM), 50 μl of DNAse I equivalent to 100 Kunits units in PBS and 100 μl of a 100 mg/ml lysozime (Sigma L-7651) solution in PBS (equivalent to 10 mg, final concentration 1 mg/ml).
[0326] 2. Transfer the resuspended pellets in 50 ml centrifuge tubes and let at room temperature for 30-40 minutes, vortexing 3-4 times.
[0327] 3. Centrifuge 15-20 minutes at about 30-40000×g.
[0328] 4. Discard centrifugation pellets and load supernatants onto the chromatography columns, as follows.
[0329] 5. Prepare Poly-Prep (Bio-Rad) columns containing 0.5 ml of Glutathione-Sepharose 4B resin. Wash the columns twice with 1 ml of H₂O and equilibrate with 10 ml PBS, pH 7.4.
[0330] 6. Load supernatants on to the columns and discard the flow through.
[0331] 7. Wash the columns with 10 ml PBS, pH 7.4.
[0332] 8. Elute proteins bound to columns with 4.5 ml of 50 mM TRIS buffer, 10 mM reduced glutathione, pH 8.0, adding 1.5 ml+1.5 ml+1.5 ml and collecting the respective 3 fractions of 1.5 ml each.
[0333] 9. Measure protein concentration of the fractions with the Bradford method and analyse the proteins by SDS-PAGE.
[0334] 10. Store the collected fractions at +4° C. while waiting for the results of the SDS-PAGE analysis.
[0335] 11. For each protein destined for immunisation prepare 4-5 aliquots of 20-100 μg each in 0.5 ml of 40% glycerol. The dilution buffer is 50 mM TRIS-HCl, 2 mM DTT, pH 8.0. Store the aliquots at −20° C. until immunisation.
   Immunisations with GBS Proteins

[0336] The purified proteins were used to immunise groups of four CD-1 mice intraperitoneally. 2 μg of each purified protein was injected in Freund's adjuvant at days 1, 21 & 35. Immune responses were monitored by using samples taken on day 0 & 49. Sera were analysed as pools of sera from each group of mice.

FACScan Bacteria Binding Assay Procedure.

[0337] GBS serotype V 2603 V/R strain was plated on TSA blood agar plates and incubated overnight at 37° C. Bacterial colonies were collected from the plates using a sterile dracon swab and inoculated into 100 ml Todd Hewitt Broth. Bacterial growth was monitored every 30 minutes by following OD₆₀₀. Bacteria were grown until OD₆₀₀=0.7-0.8. The culture was centrifuged for 20 minutes at 5000 rpm. The supernatant was discarded and bacteria were washed once with PBS, resuspended in ½ culture volume of PBS containing 0.05% paraformaldehyde, and incubated for 1 hour at 37° C. and then overnight at 4° C.

[0338] 50 μl bacterial cells (OD₆₀₀ 0.1) were washed once with PBS and resuspended in 20 μl blocking serum (Newborn Calf Serum, Sigma) and incubated for 20 minutes at room temperature. The cells were then incubated with 100 μl diluted sera (1:200) in dilution buffer (20% Newborn Calf Serum 0.1% BSA in PBS) for 1 hour at 4° C. Cells were centrifuged at 5000 rpm, the supernatant aspirated and cells washed by adding 200 μl washing buffer (0.1% BSA in PBS). 50 μl R-Phicoerytrin conjugated F(ab)₂ goat anti-mouse, diluted 1:100 in dilution buffer, was added to each sample and incubated for 1 hour at 4° C. Cells were spun down by centrifugation at 5000 rpm and washed by adding 200 μl of washing buffer. The supernatant was aspirated and cells resuspended in 200 μl PBS. Samples were transferred to FACScan tubes and read. The condition for FACScan setting were: FL2 on; FSC-H threshold: 54; FSC PMT Voltage: E 02; SSC PMT: 516; Amp. Gains 2.63; FL-2 PMT: 728. Compensation values: 0.

[0339] Samples were considered as positive if they had a Δ mean values >50 channel values.

Whole Extracts Preparation

[0340] GBS serotype III COH1 strain and serotype V 2603 V/R strain cells were grown overnight in Todd Hewitt Broth. 1 ml of the culture was inoculated into 100 ml Todd Hewitt Broth. Bacterial growth was monitored every 30 minutes by following OD₆₀₀. The bacteria were grown until the OD reached 0.7-0.8. The culture was centrifuged for 20 minutes at 5000 rpm. The supernatant was discarded and bacteria were washed once with PBS, resuspended in 2 ml 5 mM Tris-HCl, pH 6.8 adding 400 units of Mutanolysin (Sigma-Aldrich) and incubated 3 hrs at 37° C. After 3 cycles of freeze/thaw, cellular debris were removed by centrifugation at 14000 g for 15 minutes and the protein concentration of the supernatant was measured by the Bio-Rad Protein assay, using BSA as a standard.

Western Blotting

[0341] Purified proteins (50 ng) and total cell extracts (25 μg) derived from GBS serotype III COH1 strain and serotype V 2603 V/R strain were loaded on 12% or 15% SDS-PAGE and transferred to a nitrocellulose membrane. The transfer was performed for 1 hours at 100V at 4° C., in transferring buffer (25 mM Tris base, 192 mM glycine, 20% methanol). The membrane was saturated by overnight incubation at 4° C. in saturation buffer (5% skimmed milk, 0.1% Tween 20 in PBS). The membrane was incubated for 1 hour at room temperature with 1:1000 mouse sera diluted in saturation buffer. The membrane was washed twice with washing buffer (3% skimmed milk, 0.1% Tween 20 in PBS) and incubated for 1 hour with a 1:5000 dilution of horseradish peroxidase labelled anti-mouse Ig (Bio-Rad). The membrane was washed twice with 0.1% Tween 20 in PBS and developed with the Opti-4CN Substrate Kit (Bio-Rad). The reaction was stopped by adding water.

In Vivo Passive Protection Assay in Neonatal Sepsis Mouse Model.

[0342] The immune sera collected from the CD1 immunized mice were tested in a mouse neonatal sepsis model to verify their protective efficacy in mice challenged with GBS serotype III. Newborn Balb/C littermates were randomly divided in two groups within 24 hrs from birth and injected subcutaneously with 25 μl of diluted sera (1:15) from immunized CD1 adult mice. One group received preimmune sera, the other received immune sera. Four hours later all pups were challenged with a 75% lethal dose of the GBS serotype III COH1 strain. The challenge dose obtained diluting a mid log phase culture was administered subcutaneously in 25 μl of saline. The number of pups surviving GBS infection was assessed every 12 hours for 4 days.

### EXAMPLE 1

[0343] A DNA sequence was identified in S. agalactiae <SEQ ID I> which encodes the amino acid sequence <SEQ ID 2>. Analysis of this protein sequence reveals the following:

| | |
|---|---|
| Lipop: | Possible site: −1 Crend: 7 |
| McG: | Discrim Score: −13.13 |
| GvH: | Signal Score (−7.5): −3.96 |
| | Possible site: 61 |

>>> Seems to have no N-terminal signal seq.
ALOM program count: 0 value: 5.57 threshold: 0.0

PERIPHERAL Likelihood = 5.57 34

modified ALOM score: −1.61
----- Final Results -----

bacterial cytoplasm --- Certainty = 0.2917(Affirmative) <succ>
bacterial membrane --- Certainty = 0.0000(Not Clear) <succ>
bacterial outside --- Certainty = 0.0000(Not Clear) <succ>

[0344] SEQ ID 2 is a longer variant of GBS36 from WO02/34771, with translation beginning at an upstream start codon. It is predicted to be peptidase, M23/M37 family.

### EXAMPLE 2

[0345] A DNA sequence was identified in S. agalactiae <SEQ ID 3> which encodes the amino acid sequence <SEQ ID 4>. Analysis of this protein sequence reveals the following:

| | |
|---|---|
| Lipop: | Possible site: −1 Crend: 2 |
| McG: | Discrim Score: −1.67 |
| GvH: | Signal Score (−7.5): −1.3 |
| | Possible site: 32 |

>>> Seems to have no N-terminal signal seq.
ALOM program count: 10 value: −11.41 threshold: 0.0

| | | | | | |
|---|---|---|---|---|---|
| INTEGRAL | Likelihood = | −11.41 | Transmembrane | 74-90 | (65-96) |
| INTEGRAL | Likelihood = | −8.39 | Transmembrane | 290-306 | (286-310) |
| INTEGRAL | Likelihood = | −6.58 | Transmembrane | 171-187 | (166-192) |
| INTEGRAL | Likelihood = | −5.63 | Transmembrane | 324-340 | (317-343) |
| INTEGRAL | Likelihood = | −5.52 | Transmembrane | 226-242 | (223-245) |
| INTEGRAL | Likelihood = | −4.99 | Transmembrane | 369-385 | (361-393) |
| INTEGRAL | Likelihood = | −3.82 | Transmembrane | 35-51 | (34-59) |
| INTEGRAL | Likelihood = | −2.87 | Transmembrane | 113-129 | (107-130) |
| INTEGRAL | Likelihood = | −2.81 | Transmembrane | 145-161 | (145-163) |
| INTEGRAL | Likelihood = | −2.18 | Transmembrane | 16-32 | (16-33) |
| PERIPHERAL | Likelihood = | 2.49 | 257 | | |

modified ALOM score: 2.78
----- Final Results -----

bacterial membrane --- Certainty = 0.5564(Affirmative) <succ>
bacterial outside --- Certainty = 0.0000(Not Clear) <succ>
bacterial cytoplasm --- Certainty = 0.0000(Not Clear) <succ>

[0346] SEQ ID 4 is a longer variant of GBS570 from WO02/34771, with translation beginning at an upstream start codon. It is predicted to be MATE efflux family protein.

### EXAMPLE 3

[0347] A DNA sequence was identified in S. agalactiae <SEQ ID 5> which encodes the amino acid sequence <SEQ ID 6>. Analysis of this protein sequence reveals the following:

| | |
|---|---|
| Lipop: | Possible site: −1 Crend: 6 |
| McG: | Discrim Score: 21.12 |
| GvH: | Signal Score (−7.5): −0.18 |
| | Possible site: 50 |

>>> Seems to have a cleavable N-term signal seq.
ALOM program count: 7 value: −11.15 threshold: 0.0

| | | | | | |
|---|---|---|---|---|---|
| INTEGRAL | Likelihood = | −11.15 | Transmembrane | 161-177 | (150-183) |
| INTEGRAL | Likelihood = | −7.86 | Transmembrane | 83-99 | (73-109) |
| INTEGRAL | Likelihood = | −3.66 | Transmembrane | 209-225 | (208-226) |
| INTEGRAL | Likelihood = | −2.71 | Transmembrane | 266-282 | (266-286) |
| INTEGRAL | Likelihood = | −2.66 | Transmembrane | 54-70 | (52-71) |
| INTEGRAL | Likelihood = | −2.44 | Transmembrane | 287-303 | (286-303) |
| INTEGRAL | Likelihood = | −0.80 | Transmembrane | 115-131 | (115-131) |
| PERIPHERAL | Likelihood = | 3.45 | 242 | | |

modified ALOM score: 2.73
----- Final Results -----

bacterial membrane --- Certainty = 0.5458(Affirmative) <succ>
bacterial outside --- Certainty = 0.0000(Not Clear) <succ>
bacterial cytoplasm --- Certainty = 0.0000(Not Clear) <succ>

[0348] SEQ ID 6 is a longer variant of GBS594 from WO02/34771, with translation beginning at an upstream start codon. It is predicted to be ribose ABC transporter, permease protein (rbsC).

### EXAMPLE 4

[0349] A DNA sequence was identified in S. agalactiae <SEQ ID 7> which encodes the amino acid sequence <SEQ ID 8>. Analysis of this protein sequence reveals the following:

| | |
|---|---|
| Lipop: | Possible site: −1 Crend: 6 |
| McG: | Discrim Score: 8.16 |
| GvH: | Signal Score (−7.5): −4.32 |
| | Possible site: 35 |

>>> Seems to have an uncleavable N-term signal seq
ALOM program count: 11 value: −12.10 threshold: 0.0

| | | | | | |
|---|---|---|---|---|---|
| INTEGRAL | Likelihood = | −12.10 | Transmembrane | 307-323 | (303-331) |
| INTEGRAL | Likelihood = | −10.03 | Transmembrane | 10-26 | (1-36) |
| INTEGRAL | Likelihood = | −9.82 | Transmembrane | 200-216 | (192-221) |
| INTEGRAL | Likelihood = | −8.60 | Transmembrane | 330-346 | (324-353) |
| INTEGRAL | Likelihood = | −7.48 | Transmembrane | 252-268 | (250-276) |
| INTEGRAL | Likelihood = | −5.52 | Transmembrane | 55-71 | (51-74) |
| INTEGRAL | Likelihood = | −5.31 | Transmembrane | 146-162 | (143-166) |
| INTEGRAL | Likelihood = | −4.88 | Transmembrane | 86-102 | (85-103) |
| INTEGRAL | Likelihood = | −4.78 | Transmembrane | 179-195 | (172-198) |
| INTEGRAL | Likelihood = | −3.13 | Transmembrane | 114-130 | (114-130) |
| INTEGRAL | Likelihood = | −2.97 | Transmembrane | 224-240 | (224-245) |
| PERIPHERAL | Likelihood = | 12.63 | 352 | | |

modified ALOM score: 2.92
----- Final Results -----

bacterial membrane --- Certainty = 0.5840(Affirmative) <succ>
bacterial outside --- Certainty = 0.0000(Not Clear) <succ>
bacterial cytoplasm --- Certainty = 0.0000(Not Clear) <succ>

[0350] SEQ ID 8 is a longer variant of GBS538 from WO02/34771, with translation beginning at an upstream start codon. It is predicted to be glycosyl transferase, group 4 family protein.

### EXAMPLE 5

[0351] A DNA sequence was identified in S. agalactiae <SEQ ID 9> which encodes the amino acid sequence <SEQ ID 10>. Analysis of this protein sequence reveals the following:

| | |
|---|---|
| Lipop: | Possible site: −1 Crend: 0 |
| McG: | Discrim Score: −11.97 |
| GvH: | Signal Score (−7.5): −3.79 |
| | Possible site: 36 |

>>> Seems to have no N-terminal signal seq.
ALOM program count: 5 value: −9.02 threshold: 0.0

| | | | | | |
|---|---|---|---|---|---|
| INTEGRAL | Likelihood = | −9.02 | Transmembrane | 32-48 | (22-50) |
| INTEGRAL | Likelihood = | −5.68 | Transmembrane | 148-164 | (145-167) |
| INTEGRAL | Likelihood = | −4.30 | Transmembrane | 72-88 | (66-94) |
| INTEGRAL | Likelihood = | −3.72 | Transmembrane | 129-145 | (129-145) |
| INTEGRAL | Likelihood = | −3.19 | Transmembrane | 181-197 | (180-199) |
| PERIPHERAL | Likelihood = | 2.17 | 55 | | |

modified ALOM score: 2.30

----- Final Results -----
bacterial membrane --- Certainty = 0.4609(Affirmative) <succ>
bacterial outside --- Certainty = 0.0000(Not Clear) <succ>
bacterial cytoplasm --- Certainty = 0.0000(Not Clear) <succ>

[0352] SEQ ID 10 is a longer variant of GBS590 from WO02/34771, with translation beginning at an upstream start codon. It is predicted to be amino acid ABC transporter, permease protein.

### EXAMPLE 6

[0353] A DNA sequence was identified in S. agalactiae <SEQ ID 11> which encodes the amino acid sequence <SEQ ID 12>. Analysis of this protein sequence reveals the following:

| | |
|---|---|
| Lipop: | Possible site: −1 Crend: 7 |
| McG: | Discrim Score: −3.19 |
| GvH: | Signal Score (−7.5): −4.17 |
| | Possible site: 17 |

>>> Seems to have no N-terminal signal seq.
ALOM program count: 4 value: −10.40 threshold: 0.0

| | | | | | |
|---|---|---|---|---|---|
| INTEGRAL | Likelihood = | −10.40 | Transmembrane | 78-94 | (71-104) |
| INTEGRAL | Likelihood = | −7.86 | Transmembrane | 117-133 | (115-139) |
| INTEGRAL | Likelihood = | −6.90 | Transmembrane | 48-64 | (43-66) |
| INTEGRAL | Likelihood = | −5.52 | Transmembrane | 147-163 | (137-164) |
| PERIPHERAL | Likelihood = | 11.83 | 12 | | |

modified ALOM score: 2.58
----- Final Results -----

bacterial membrane --- Certainty = 0.5161(Affirmative) <succ>
bacterial outside --- Certainty = 0.0000(Not Clear) <succ>
bacterial cytoplasm --- Certainty= 0.0000(Not Clear) <succ>

[0354] SEQ ID 12 is a longer variant of GBS566 from WO02/34771, with translation beginning at an upstream start codon.

### EXAMPLE 7

[0355] A DNA sequence was identified in S. agalactiae <SEQ ID 13> which encodes the amino acid sequence <SEQ ID 14>. Analysis of this protein sequence reveals the following:

| | |
|---|---|
| Lipop: | Possible site: −1 Crend: 10 |
| McG: | Discrim Score: −5.99 |
| GvH: | Signal Score (−7.5): −4.37 |
| | Possible site: 27 |

>>> Seems to have no N-terminal signal seq.
ALOM program count: 2 value: −2.18 threshold: 0.0

| | | | | | |
|---|---|---|---|---|---|
| INTEGRAL | Likelihood = | −2.18 | Transmembrane | 110-126 | (110-127) |
| INTEGRAL | Likelihood = | −1.06 | Transmembrane | 136-152 | (136-152) |
| PERIPHERAL | Likelihood = | 1.32 | 49 | | |

modified ALOM score: 0.94
----- Final Results -----

bacterial membrane --- Certainty = 0.1871(Affirmative) <succ>
bacterial outside --- Certainty = 0.0000(Not Clear) <succ>
bacterial cytoplasm --- Certainty = 0.0000(Not Clear) <succ>

[0356] SEQ ID 14 is a longer variant of GBS374 from WO02/34771, with translation beginning at an upstream start codon. It is predicted to be enoyl-CoA hydratase/isomerase family protein.

### EXAMPLE 8

[0357] A DNA sequence was identified in S. agalactiae <SEQ ID 15> which encodes the amino acid sequence <SEQ ID 16>. Analysis of this protein sequence reveals the following:

| | |
|---|---|
| Lipop: | Possible site: −1 Crend: 10 |
| McG: | Discrim Score: 1.67 |
| GvH: | Signal Score (−7.5): −5.85 |
| | Possible site: 38 |

>>> Seems to have an uncleavable N-term signal seq
ALOM program count: 5 value: −8.65 threshold: 0.0

| | | | | | |
|---|---|---|---|---|---|
| INTEGRAL | Likelihood = | −8.65 | Transmembrane | 163-179 | (154-182) |
| INTEGRAL | Likelihood = | −5.15 | Transmembrane | 24-40 | (20-45) |
| INTEGRAL | Likelihood = | −4.88 | Transmembrane | 142-158 | (132-162) |
| INTEGRAL | Likelihood = | −1.49 | Transmembrane | 250-266 | (250-269) |
| INTEGRAL | Likelihood = | −1.33 | Transmembrane | 60-76 | (60-76) |
| PERIPHERAL | Likelihood = | 3.02 | 482 | | |

modified ALOM score: 2.23
----- Final Results -----

bacterial membrane --- Certainty = 0.4461(Affirmative) <succ>
bacterial outside --- Certainty = 0.0000(Not Clear) <succ>
bacterial cytoplasm --- Certainty = 0.0000(Not Clear) <succ>

[0358] SEQ ID 16 is a longer variant of GBS540 from WO02/34771, with translation beginning at an upstream start codon. It is predicted to be ABC transporter, ATP-binding/permease protein.

### EXAMPLE 9

[0359] A DNA sequence was identified in S. agalactiae <SEQ ID 17> which encodes the amino acid sequence <SEQ ID 18>. Analysis of this protein sequence reveals the following:

| | |
|---|---|
| Lipop: | Possible site: −1 Crend: 0 |
| McG: | Discrim Score: −4.80 |
| GvH: | Signal Score (−7.5): −3.64 |
| | Possible site: 36 |

>>> Seems to have no N-terminal signal seq.
ALOM program count: 1 value: -3.19 threshold: 0.0

| | | | | | |
|---|---|---|---|---|---|
| INTEGRAL | Likelihood = | −3.19 | Transmembrane | 294-310 | (293-310) |
| PERIPHERAL | Likelihood = | 0.53 | 97 | | |

modified ALOM score: 1.14
----- Final Results -----

bacterial membrane --- Certainty = 0.2275(Affirmative) <succ>
bacterial outside --- Certainty = 0.0000(Not Clear) <succ>
bacterial cytoplasm --- Certainty = 0.0000(Not Clear) <succ>

[0360] SEQ ID 18 is a longer variant of GBS73 from WO02/34771, with translation beginning at an upstream start codon. It is predicted to be cell division protein FtsA (ftsA).

### EXAMPLE 10

[0361] A DNA sequence was identified in S. agalactiae <SEQ ID 19> which encodes the amino acid sequence <SEQ ID 20>. Analysis of this protein sequence reveals the following:

| | |
|---|---|
| Lipop: | Possible site: −1 Crend: 0 |
| McG: | Discrim Score: 10.14 |
| GvH: | Signal Score (−7.5): −2.52 |
| | Possible site: 48 |

>>> Seems to have an uncleavable N-term signal seq
ALOM program count: 2 value: −15.28 threshold: 0.0

| | | | | | |
|---|---|---|---|---|---|
| INTEGRAL | Likelihood = | −15.28 | Transmembrane | 234-250 | (229-257) |
| INTEGRAL | Likelihood = | −0.11 | Transmembrane | 3-19 | (3-20) |
| PERIPHERAL | Likelihood = | 2.76 | 84 | | |

modified ALOM score: 3.56
----- Final Results -----

bacterial membrane --- Certainty = 0.7114(Affirmative) <succ>
bacterial outside --- Certainty = 0.0000(Not Clear) <succ>
bacterial cytoplasm --- Certainty = 0.0000(Not Clear) <succ>

[0362] SEQ ID 20 is a longer variant of GBS208 from WO02/34771, with translation beginning at an upstream start codon. It is predicted to be sortase family protein.

### EXAMPLE 11

[0363] A DNA sequence was identified in S. agalactiae <SEQ ID 21> which encodes the amino acid sequence <SEQ ID 22>. Analysis of this protein sequence reveals the following:

| | |
|---|---|
| Lipop: | Possible site: −1 Crend: 10 |
| McG: | Discrim Score: −24.35 |
| GvH: | Signal Score (−7.5): −10.27 |
| | Possible site: 50 |

>>> Seems to have no N-terminal signal seq.
ALOM program count: 1 value: −4.30 threshold: 0.0

| | | | | | |
|---|---|---|---|---|---|
| INTEGRAL | Likelihood = | −4.30 | Transmembrane | 1039-1055 | (1037-1056) |
| PERIPHERAL | Likelihood = | 3.71 | 647 | | |

modified ALOM score: 1.36
----- Final Results -----

bacterial membrane --- Certainty = 0.2720(Affirmative) <succ>
bacterial outside --- Certainty = 0.0000(Not Clear) <succ>
bacterial cytoplasm --- Certainty = 0.0000(Not Clear) <succ>

[0364] SEQ ID 22 is a longer variant of GBS195 from WO02/34771, with translation beginning at an upstream start codon.

### EXAMPLE 12

[0365] A DNA sequence was identified in S. agalactiae <SEQ ID 23> which encodes the amino acid sequence <SEQ ID 24>. Analysis of this protein sequence reveals the following:

| | |
|---|---|
| Lipop: | Possible site: −1 Crend: 0 |
| McG: | Discrim Score: 5.21 |
| GvH: | Signal Score (−7.5): −7.17 |
| | Possible site: 13 |

>>> Seems to have an uncleavable N-term signal seq

| ALOM program | | count: 1 value: −2.28 threshold: 0.0 | |
|---|---|---|---|
| | INTEGRAL | Likelihood = −2.28 | Transmembrane 182-198 (180-198) |

| | | |
|---|---|---|
| PERIPHERAL | Likelihood = 4.35 | 133 |

modified ALOM score: 0.96
----- Final Results -----

bacterial membrane --- Certainty = 0.1914(Affirmative) < succ>
bacterial outside --- Certainty = 0.0000(Not Clear) < succ>
bacterial cytoplasm --- Certainty = 0.0000(Not Clear) < succ>

[0366] SEQ ID 24 is a longer variant of GBS259 from WO02/34771, with translation beginning at an upstream start codon.

### EXAMPLE 13

[0367] A DNA sequence was identified in S. agalactiae <SEQ ID 25> which encodes the amino acid sequence <SEQ ID 26>. Analysis of this protein sequence reveals the following:

| | |
|---|---|
| Lipop: | Possible site: −1 Crend: 10 |
| McG: | Discrim Score: 20.16 |
| GvH: | Signal Score (−7.5): −2.08 |
| | Possible site: 30 |

>>> Seems to have a cleavable N-term signal seq.

| ALOM program | | count: 0 value: 10.45 threshold: 0.0 | |
|---|---|---|---|
| | PERIPHERAL | Likelihood = 10.45 | 32 |

modified ALOM score: −2.59
----- Final Results -----

bacterial outside --- Certainty = 0.3000(Affirmative) < succ>
bacterial membrane --- Certainty = 0.0000(Not Clear) < succ>
bacterial cytoplasm --- Certainty = 0.0000(Not Clear) < succ>

[0368] SEQ ID 26 is a longer variant of GBS168 from WO02/34771, with translation beginning at an upstream start codon.

### EXAMPLE 14

[0369] A DNA sequence was identified in S. agalactiae <SEQ ID 27> which encodes the amino acid sequence <SEQ ID 28>. Analysis of this protein sequence reveals the following:

| | |
|---|---|
| Lipop: | Possible site: −l Crend: 3 |
| McG: | Discrim Score: 10.84 |
| GvH: | Signal Score (−7.5): −2.23 |
| | Possible site: 20 |

>>> Seems to have a cleavable N-term signal seq.

| ALOM program | | count: 3 value: −11.94 threshold: 0.0 | |
|---|---|---|---|
| | INTEGRAL | Likelihood = −11.94 | Transmembrane 127-143 (118-151) |
| | INTEGRAL | Likelihood = −11.09 | Transmembrane 185-201 (178-204) |
| | INTEGRAL | Likelihood = −4.94 | Transmembrane 90-106 (89-110) |

| | | |
|---|---|---|
| PERIPHERAL | Likelihood = 2.33 | 23 |

modified ALOM score: 2.89
----- Final Results -----

bacterial membrane --- Certainty = 0.5776(Affirmative) < succ>
bacterial outside --- Certainty = 0.0000(Not Clear) < succ>
bacterial cytoplasm --- Certainty = 0.0000(Not Clear) < succ>

[0370] SEQ ID 28 is a longer variant of GBS167 from WO02/34771, with translation beginning at an upstream start codon.

### EXAMPLE 15

[0371] A DNA sequence was identified in S. agalactiae <SEQ ID 29> which encodes the amino acid sequence <SEQ ID 30>. Analysis of this protein sequence reveals the following:

| | |
|---|---|
| Lipop: | Possible site: 21 Crend: 3 |
| McG: | Discrim Score: 11.16 |
| GvH: | Signal Score (−7.5): −1.96 |
| | Possible site: 23 |

>>> May be a lipoprotein
ALOM program count: 0 value: 8.96 threshold: 0.0

PERIPHERAL Likelihood = 8.96 67

modified ALOM score: −2.29
----- Final Results -----

bacterial membrane --- Certainty = 0.0000(Not Clear) <succ>
bacterial outside --- Certainty = 0.0000(Not Clear) <succ>
bacterial cytoplasm --- Certainty = 0.0000(Not Clear) <succ>

[0372] SEQ ID 30 is a longer variant of GBS225 from WO02/34771, with translation beginning at an upstream start codon. It is predicted to be amino acid ABC transporter, amino acid-binding protein.

### EXAMPLE 16

[0373] A DNA sequence was identified in S. agalacliae <SEQ ID 31> which encodes the amino acid sequence <SEQ ID 32>. Analysis of this protein sequence reveals the following:

| | |
|---|---|
| Lipop: | Possible site: −1 Crend: 0 |
| McG: | Discrim Score: 7.64 |
| GvH: | Signal Score (−7.5): −1.53 |
| | Possible site: 18 |

>>> Seems to have a cleavable N-term signal seq.
ALOM program count: 8 value: −7.75 threshold: 0.0

| | | | | | |
|---|---|---|---|---|---|
| INTEGRAL | Likelihood = | −7.75 | Transmembrane | 156-172 | (153-175) |
| INTEGRAL | Likelihood = | −7.38 | Transmembrane | 69-85 | (66-93) |
| INTEGRAL | Likelihood = | −5.47 | Transmembrane | 285-301 | (280-308) |
| INTEGRAL | Likelihood = | −4.09 | Transmembrane | 103-119 | (102-120) |
| INTEGRAL | Likelihood = | −3.24 | Transmembrane | 39-55 | (39-55) |
| INTEGRAL | Likelihood = | −1.91 | Transmembrane | 254-270 | (254-271) |
| INTEGRAL | Likelihood = | −1.33 | Transmembrane | 230-246 | (229-247) |
| INTEGRAL | Likelihood = | −0.00 | Transmembrane | 205-221 | (205-221) |
| PERIPHERAL | Likelihood = | 3.34 | 135 | | |

modified ALOM score: 2.05
----- Final Results -----

bacterial membrane --- Certainty = 0.4100(Affirmative) <succ>
bacterial outside --- Certainty = 0.0000(Not Clear) <succ>
bacterial cytoplasm --- Certainty = 0.0000(Not Clear) <succ>

[0374] SEQ ID 32 is a longer variant of GBS507 from WO02/34771, with translation beginning at an upstream start codon. It is predicted to be a sugar ABC transporter, permease protein.

### EXAMPLE 17

[0375] A DNA sequence was identified in S. agalactiae <SEQ ID 33> which encodes the amino acid sequence <SEQ ID 34>. Analysis of this protein sequence reveals the following:

| | |
|---|---|
| Lipop: | Possible site: −1 Crend: 8 |
| McG: | Discrim Score: −6.80 |
| GvH: | Signal Score (−7.5): −4.75 |
| | Possible site: 59 |

>>> Seems to have no N-terminal signal seq.
ALOM program count: 1 value: −0.22 threshold: 0.0

| | | | | | |
|---|---|---|---|---|---|
| INTEGRAL | Likelihood = | −0.22 | Transmembrane | 93-109 | (93-109) |
| PERIPHERAL | Likelihood = | 0.47 | 49 | | |

modified ALOM score: 0.54
----- Final Results -----

bacterial membrane --- Certainty = 0.1086(Affirmative) <succ>
bacterial outside --- Certainty = 0.0000(Not Clear) <succ>
bacterial cytoplasm --- Certainty = 0.0000(Not Clear) <succ>

[0376] SEQ ID 34 is a longer variant of GBS390 from WO02/34771, with translation beginning at an upstream start codon. It is predicted to be lipoate-protein ligase A family protein.

### EXAMPLE 18

[0377] A DNA sequence was identified in S. agalactiae <SEQ ID 35> which encodes the amino acid sequence <SEQ ID 36>. Analysis of this protein sequence reveals the following:

| | |
|---|---|
| Lipop: | Possible site: −1 Crend: 10 |
| McG: | Discrim Score: 6.20 |
| GvH: | Signal Score (−7.5): −4.59 |
| | Possible site: 15 |

>>> Seems to have an uncleavable N-term signal seq
ALOM program count: 10 value: −12.10 threshold: 0.0

| | | | | | |
|---|---|---|---|---|---|
| INTEGRAL | Likelihood = | −12.10 | Transmembrane | 428-444 | (420-449) |
| INTEGRAL | Likelihood = | −8.92 | Transmembrane | 146-162 | (144-171) |
| INTEGRAL | Likelihood = | −8.86 | Transmembrane | 401-417 | (399-425) |
| INTEGRAL | Likelihood = | −7.91 | Transmembrane | 296-312 | (290-315) |
| INTEGRAL | Likelihood = | −6.42 | Transmembrane | 377-393 | (371-395) |
| INTEGRAL | Likelihood = | −5.31 | Transmembrane | 347-363 | (344-364) |
| INTEGRAL | Likelihood = | −4.57 | Transmembrane | 53-69 | (51-71) |
| INTEGRAL | Likelihood = | −3.24 | Transmembrane | 169-185 | (168-195) |
| INTEGRAL | Likelihood = | −1.33 | Transmembrane | 221-237 | (221-237) |
| INTEGRAL | Likelihood = | −0.59 | Transmembrane | 98-114 | (98-114) |
| PERIPHERAL | Likelihood = | 0.85 | 17 | | |

modified ALOM score: 2.92
----- Final Results -----

bacterial membrane --- Certainty = 0.5840(Affirmative) <succ>
bacterial outside --- Certainty = 0.0000(Not Clear) <succ>
bacterial cytoplasm --- Certainty = 0.0000(Not Clear) <succ>

[0378] SEQ ID 36 is a longer variant of GBS638 from WO02/34771, with translation beginning at an upstream start codon. It is predicted to be potassium uptake protein.

### EXAMPLE 19

[0379] A DNA sequence was identified in S. agalactiae <SEQ ID 37> which encodes the amino acid sequence <SEQ ID 38>. Analysis of this protein sequence reveals the following:

| | |
|---|---|
| Lipop: | Possible site: −1 Crend: 8 |
| McG: | Discrim Score: −5.88 |
| GvH: | Signal Score (−7.5): −2.86 |
| | Possible site: 61 |

>>> Seems to have no N-terminal signal seq.
ALOM program count: 0 value: 1.43 threshold: 0.0

PERIPHERAL Likelihood = 1.43 49

modified ALOM score: −0.79
----- Final Results -----

bacterial cytoplasm --- Certainty = 0.1249(Affirmative) <succ>
bacterial membrane --- Certainty = 0.0000(Not Clear) <succ>
bacterial outside --- Certainty = 0.0000(Not Clear) <succ>

[0380] SEQ ID 38 is a longer variant of GBS308 from WO02/34771, with translation beginning at an upstream start codon.

### EXAMPLE 20

[0381] A DNA sequence was identified in S. agalacliae <SEQ ID 39> which encodes the amino acid sequence <SEQ ID 40>. Analysis of this protein sequence reveals the following:

| | |
|---|---|
| Lipop: | Possible site: −1 Crend: 10 |
| McG: | Discrim Score: −5.56 |
| GvH: | Signal Score (−7.5): −4.41 |
| | Possible site: 28 |

>>> Seems to have no N-terminal signal seq.
ALOM program count: 0 value: 2.49 threshold: 0.0

PERIPHERAL Likelihood = 2.49 225

modified ALOM score: −1.00
----- Final Results -----

bacterial cytoplasm --- Certainty = 0.1495(Affirmative) <succ>
bacterial membrane --- Certainty = 0.0000(Not Clear) <succ>
bacterial outside --- Certainty = 0.0000(Not Clear) <succ>

[0382] SEQ ID 40 is a longer variant of GBS381 from WO02/34771, with translation beginning at an upstream start codon. It is predicted to be homocysteine S-methyltransferase MmuM.

### EXAMPLE 21

[0383] A DNA sequence was identified in S. agalactiae <SEQ ID 41> which encodes the amino acid sequence <SEQ ID 42>. Analysis of this protein sequence reveals the following:

| | |
|---|---|
| Lipop: | Possible site: −1 Crend: 0 |
| McG: | Discrim Score: −0.04 |
| GvH: | Signal Score (−7.5): −3.64 |
| | Possible site: 46 |

>>> Seems to have no N-terminal signal seq.
ALOM program count: 0 value: 1.64 threshold: 0.0

PERIPHERAL Likelihood = 1.64 46

modified ALOM score: −0.83
----- Final Results -----

bacterial cytoplasm --- Certainty = 0.0236(Affirmative) <succ>
bacterial membrane --- Certainty = 0.0000(Not Clear) <succ>
bacterial outside --- Certainty = 0.0000(Not Clear) <succ>

[0384] SEQ ID 42 is a longer variant of GBS647 from WO02/34771, with translation beginning at an upstream start codon. It is predicted to be 4-diphosphocytidyl-2C-methyl-D-erythritol synthase.

### EXAMPLE 22

[0385] A DNA sequence was identified in S. agalactiae <SEQ ID 43> which encodes the amino acid sequence <SEQ ID 44>. Analysis of this protein sequence reveals the following:

| | |
|---|---|
| Lipop: | Possible site: −1 Crend: 2 |
| McG: | Discrim Score: −0.72 |
| GvH: | Signal Score (−7.5): −3.51 |
| | Possible site: 61 |

>>> Seems to have no N-terminal signal seq.
ALOM program count: 0 value: 8.43 threshold: 0.0

PERIPHERAL Likelihood = 8.43 109

modified ALOM score: −2.19
----- Final Results -----

bacterial cytoplasm --- Certainty = 0.0347(Affirmative) <succ>
bacterial membrane --- Certainty = 0.0000(Not Clear) <succ>
bacterial outside --- Certainty = 0.0000(Not Clear) <succ>

[0386] SEQ ID 44 is a longer variant of GBS245 from WO02/34771, with translation beginning at an upstream start codon. It is predicted to be dephospho-CoA kinase.

### EXAMPLE 23

[0387] A DNA sequence was identified in S. agalactiae <SEQ ID 45> which encodes the amino acid sequence <SEQ ID 46>. Analysis of this protein sequence reveals the following:

| | |
|---|---|
| Lipop: | Possible site: −1 Crend: 10 |
| McG: | Discrim Score: −17.55 |
| GvH: | Signal Score (−7.5): −4.5 |
| | Possible site: 27 |

>>> Seems to have no N-terminal signal seq.
ALOM program count: 0 value: 7.21 threshold: 0.0

PERIPHERAL Likelihood = 7.21 257

modified ALOM score: −1.94
----- Final Results -----

bacterial cytoplasm --- Certainty = 0.3910(Affirmative) <succ>
bacterial membrane --- Certainty = 0.0000(Not Clear) <succ>
bacterial outside --- Certainty = 0.0000(Not Clear) <succ>

[0388] SEQ ID 46 is a longer variant of GBS186 from WO02/34771, with translation beginning at an upstream start codon. It is predicted to be peptide ABC transporter, peptide-binding protein.

### EXAMPLE 24

[0389] A DNA sequence was identified in S. agalactiae <SEQ ID 47> which encodes the amino acid sequence <SEQ ID 48>. Analysis of this protein sequence reveals the following:

| | |
|---|---|
| Lipop: | Possible site: −1 Crend: 9 |
| McG: | Discrim Score: −24.57 |
| GvH: | Signal Score (−7.5): −6.25 |
| | Possible site: 56 |

>>> Seems to have no N-terminal signal seq.
ALOM program count: 1 value: −4.14 threshold: 0.0

| | | | | | |
|---|---|---|---|---|---|
| INTEGRAL | Likelihood = | −4.14 | Transmembrane | 115-131 | (114-132) |
| PERIPHERAL | Likelihood = | 7.74 | 162 | | |

modified ALOM score: 1.33
----- Final Results -----

bacterial membrane --- Certainty = 0.2657(Affirmative) <succ>
bacterial outside --- Certainty = 0.0000(Not Clear) <succ>
bacterial cytoplasm --- Certainty = 0.0000(Not Clear) <succ>

[0390] SEQ ID 48 is a longer variant of GBS383 from WO02/34771, with translation beginning at an upstream start codon. It is predicted to be integrase/recombinase, phage integrase family.

### EXAMPLE 25

[0391] A DNA sequence was identified in S. agalactiae <SEQ ID 49> which encodes the amino acid sequence <SEQ ID 50>. Analysis of this protein sequence reveals the following:

| | |
|---|---|
| Lipop: | Possible site: −1 Crend: 7 |
| McG: | Discrim Score: 13.50 |
| GvH: | Signal Score (−7.5): 0.21 |
| | Possible site: 52 |

>>> Seems to have a cleavable N-term signal seq.
ALOM program count: 7 value: −8.70 threshold: 0.0

| | | | | | |
|---|---|---|---|---|---|
| INTEGRAL | Likelihood = | −8.70 | Transmembrane | 245-261 | (241-269) |
| INTEGRAL | Likelihood = | −6.42 | Transmembrane | 89-105 | (84-119) |
| INTEGRAL | Likelihood = | −6.26 | Transmembrane | 173-189 | (169-194) |
| INTEGRAL | Likelihood = | −5.47 | Transmembrane | 269-285 | (268-289) |
| INTEGRAL | Likelihood = | −4.35 | Transmembrane | 107-123 | (106-126) |
| INTEGRAL | Likelihood = | −3.29 | Transmembrane | 136-152 | (135-153) |
| INTEGRAL | Likelihood = | −2.76 | Transmembrane | 200-216 | (200-219) |
| PERIPHERAL | Likelihood = | 4.40 | 217 | | |

modified ALOM score: 2.24
----- Final Results -----

bacterial membrane --- Certainty = 0.4482(Affirmative) <succ>
bacterial outside --- Certainty = 0.0000(Not Clear) <succ>
bacterial cytoplasm --- Certainty = 0.0000(Not Clear) <succ>

[0392] SEQ ID 50 is a longer variant of GBS517 from WO02/34771, with translation beginning at an upstream start codon. It is predicted to be membrane protein.

### EXAMPLE 26

[0393] A DNA sequence was identified in S. agalactiae <SEQ ID 51> which encodes the amino acid sequence <SEQ ID 52>. Analysis of this protein sequence reveals the following:

| | |
|---|---|
| Lipop: | Possible site: −1 Crend: 9 |
| McG: | Discrim Score: −8.86 |
| GvH: | Signal Score (−7.5): −4.55 |
| | Possible site: 40 |

>>> Seems to have no N-terminal signal seq.
ALOM program count: 0 value: 2.81 threshold: 0.0

PERIPHERAL Likelihood = 2.81 66

modified ALOM score: −1.06
----- Final Results -----

bacterial cytoplasm --- Certainty = 0.2181(Affirmative) <succ>
bacterial membrane --- Certainty = 0.0000(Not Clear) <succ>
bacterial outside --- Certainty = 0.0000(Not Clear) <succ>

[0394] SEQ ID 52 is a longer variant of GBS648 from WO02/34771, with translation beginning at an upstream start codon.

### EXAMPLE 27

[0395] A DNA sequence was identified in S. agalactiae <SEQ ID 53> which encodes the amino acid sequence <SEQ ID 54>. Analysis of this protein sequence reveals the following:

| | |
|---|---|
| Lipop: | Possible site: −1 Crend: 0 |
| McG: | Discrim Score: 9.74 |
| GvH: | Signal Score (−7.5): −3.42 |
| | Possible site: 21 |

>>> Seems to have an uncleavable N-term signal seq
ALOM program count: 2 value: −3.61 threshold: 0.0

| | | | | | |
|---|---|---|---|---|---|
| INTEGRAL | Likelihood = | −3.61 | Transmembrane | 5-21 | (1-22) |
| INTEGRAL | Likelihood = | −1.97 | Transmembrane | 34-50 | (33-53) |
| PERIPHERAL | Likelihood = | 1.01 | 205 | | |

modified ALOM score: 1.22
----- Final Results -----

bacterial membrane --- Certainty = 0.2444(Affirmative) <succ>
bacterial outside --- Certainty = 0.0000(Not Clear) <succ>
bacterial cytoplasm --- Certainty = 0.0000(Not Clear) <succ>

[0396] SEQ ID 54 is a longer variant of GBS216 from WO02/34771, with translation beginning at an upstream start codon. It is predicted to be FtsK/SpoIIIE family protein.

### EXAMPLE 28

[0397] A DNA sequence was identified in S. agalactiae <SEQ ID 55> which encodes the amino acid sequence <SEQ ID 56>. Analysis of this protein sequence reveals the following:

| | |
|---|---|
| Lipop: | Possible site: −1 Crend: 3 |
| McG: | Discrim Score: −17.31 |
| GvH: | Signal Score (−7.5): −1.85 |
| | Possible site: 58 |

>>> Seems to have no N-terminal signal seq.
ALOM program count: 1 value: -4.94 threshold: 0.0

| | | | | | |
|---|---|---|---|---|---|
| INTEGRAL | Likelihood = | −4.94 | Transmembrane | 801-817 | (799-821) |
| PERIPHERAL | Likelihood = | 4.29 | 32 | | |

modified ALOM score: 1.49
----- Final Results -----

bacterial membrane --- Certainty = 0.2975(Affirmative) <succ>
bacterial outside --- Certainty = 0.0000(Not Clear) <succ>
bacterial cytoplasm --- Certainty = 0.0000(Not Clear) <succ>

[0398] SEQ ID 56 is a longer variant of GBS191 from WO02/34771, with translation beginning at an upstream start codon. It is predicted to be cell wall surface anchor family protein.

### EXAMPLE 29

[0399] A DNA sequence was identified in S. agalactiae <SEQ ID 57> which encodes the amino acid sequence <SEQ ID 58>. Analysis of this protein sequence reveals the following:

| | |
|---|---|
| Lipop: | Possible site: −1 Crend: 8 |
| McG: | Discrim Score: −5.16 |
| GvH: | Signal Score (−7.5): −2.17 |
| | Possible site: 42 |

>>> Seems to have no N-terminal signal seq.
ALOM program count: 1 value: −0.16 threshold: 0.0

| | | | | | |
|---|---|---|---|---|---|
| INTEGRAL | Likelihood = | −0.16 | Transmembrane | 34-50 | (34-50) |
| PERIPHERAL | Likelihood = | 4.14 | 16 | | |

modified ALOM score: 0.53
----- Final Results -----

bacterial membrane --- Certainty = 0.1065(Affirmative) <succ>
bacterial outside --- Certainty = 0.0000(Not Clear) <succ>
bacterial cytoplasm --- Certainty = 0.0000(Not Clear) <succ>

[0400] SEQ ID 58 is a longer variant of GBS394 from WO02/34771, with translation beginning at an upstream start codon.

### EXAMPLE 30

[0401] A DNA sequence was identified in S. agalactiae <SEQ ID 59> which encodes the amino acid sequence <SEQ ID 60>. Analysis of this protein sequence reveals the following:

| | |
|---|---|
| Lipop: | Possible site: −1 Crend: 0 |
| McG: | Discrim Score: 0.49 |
| GvH: | Signal Score (−7.5): −6.93 |
| | Possible site: 13 |

>>> Seems to have an uncleavable N-term signal seq
ALOM program count: 0 value: 0.47 threshold: 0.0

PERIPHERAL Likelihood = 0.47 60

modified ALOM score: −0.59
----- Final Results -----

bacterial membrane --- Certainty = 0.0000(Not Clear) <succ>
bacterial outside --- Certainty = 0.0000(Not Clear) <succ>
bacterial cytoplasm --- Certainty = 0.0000(Not Clear) <succ>

[0402] SEQ ID 60 is predicted to be phosphoribosylaminoimidazole carboxylase, catalytic subunit (purE).

### EXAMPLE 31

[0403] A DNA sequence was identified in S. agalactiae <SEQ ID 61> which encodes the amino acid sequence <SEQ ID 62>. Analysis of this protein sequence reveals the following:

| | |
|---|---|
| Lipop: | Possible site: −1 Crend: 4 |
| McG: | Discrim Score: −13.80 |
| GvH: | Signal Score (−7.5): −7.02 |
| | Possible site: 37 |

>>> Seems to have no N-terminal signal seq.
ALOM program count: 0 value: 11.03 threshold: 0.0

PERIPHERAL Likelihood = 11.03 42

modified ALOM score: −2.71
----- Final Results -----

bacterial cytoplasm --- Certainty = 0.3665(Affirmative) <succ>
bacterial membrane --- Certainty = 0.0000(Not Clear) <succ>
bacterial outside --- Certainty = 0.0000(Not Clear) <succ>

[0404] SEQ ID 62 is predicted to be transcriptional regulator ComX1.

### EXAMPLE 32

[0405] A DNA sequence was identified in S. agalactiae <SEQ ID 63> which encodes the amino acid sequence <SEQ ID 64>. Analysis of this protein sequence reveals the following:

| | |
|---|---|
| Lipop: | Possible site: −1 Crend: 7 |
| McG: | Discrim Score: −0.99 |
| GvH: | Signal Score (−7.5): −4.98 |
| | Possible site: 28 |

>>> Seems to have no N-terminal signal seq.
ALOM program count: 0 value: 1.70 threshold: 0.0

PERIPHERAL Likelihood = 1.70 216

modified ALOM score: −0.84
----- Final Results -----

bacterial cytoplasm --- Certainty = 0.0695(Affirmative) <succ>
bacterial membrane --- Certainty = 0.0000(Not Clear) <succ>
bacterial outside --- Certainty = 0.0000(Not Clear) <succ>

[0406] SEQ ID 64 is predicted to be heat-inducible transcription repressor HrcA (hrcA).

### EXAMPLE 33

[0407] A DNA sequence was identified in S. agalactiae <SEQ ID 65> which encodes the amino acid sequence <SEQ ID 66>. Analysis of this protein sequence reveals the following:

| | |
|---|---|
| Lipop: | Possible site: −1 Crend: 10 |
| McG: | Discrim Score: −9.70 |
| GvH: | Signal Score (−7.5): −4.45 |
| | Possible site: 41 |

>>> Seems to have no N-terminal signal seq.
ALOM program count: 0 value: 3.07 threshold: 0.0

PERIPHERAL Likelihood = 3.07 388

modified ALOM score: −1.11
----- Final Results -----

bacterial cytoplasm --- Certainty = 0.2331(Affirmative) <succ>
bacterial membrane --- Certainty = 0.0000(Not Clear) <succ>
bacterial outside --- Certainty = 0.0000(Not Clear) <succ>

[0408] SEQ ID 66 is predicted to be DAK2 domain protein.

### EXAMPLE 34

[0409] A DNA sequence was identified in S. agalactiae <SEQ ID 67> which encodes the amino acid sequence <SEQ ID 68>. Analysis of this protein sequence reveals the following:

| | |
|---|---|
| Lipop: | Possible site: −1 Crend: 7 |
| McG: | Discrim Score: −9.07 |
| GvH: | Signal Score (−7.5): −4.07 |
| | Possible site: 22 |

>>> Seems to have no N-terminal signal seq.
ALOM program count: 0 value: 2.70 threshold: 0.0

PERIPHERAL Likelihood = 2.70 651

modified ALOM score: −1.04
----- Final Results -----

bacterial cytoplasm --- Certainty = 0.2128(Affirmative) <succ>
bacterial membrane --- Certainty = 0.0000(Not Clear) <succ>
bacterial outside --- Certainty = 0.0000(Not Clear) <succ>

[0410] SEQ ID 68 is predicted to be DNA-directed RNA polymerase beta′ subunit (rpoC).

### EXAMPLE 35

[0411] A DNA sequence was identified in S. agalactiae <SEQ ID 69> which encodes the amino acid sequence <SEQ ID 70>. Analysis of this protein sequence reveals the following:

| | |
|---|---|
| Lipop: | Possible site: −1 Crend: 8 |
| McG: | Discrim Score: −4.26 |
| GvH: | Signal Score (−7.5): −5.06 |
| | Possible site: 55 |

>>> Seems to have no N-terminal signal seq.
ALOM program count: 0 value: 6.95 threshold: 0.0

PERIPHERAL Likelihood = 6.95 265

modified ALOM score: −1.89
----- Final Results -----

bacterial cytoplasm --- Certainty = 0.1364(Affirmative) <succ>
bacterial membrane --- Certainty = 0.0000(Not Clear) <succ>
bacterial outside --- Certainty = 0.0000(Not Clear) <succ>

[0412] SEQ ID 70 is predicted to be glycyl-tRNA synthetase, alpha subunit (glyQ).

### EXAMPLE 36

[0413] A DNA sequence was identified in S. agalactiae <SEQ ID 71> which encodes the amino acid sequence <SEQ ID 72>. Analysis of this protein sequence reveals the following:

| | |
|---|---|
| Lipop: | Possible site: −1 Crend: 6 |
| McG: | Discrim Score: 10.31 |
| GvH: | Signal Score (−7.5): −5.15 |
| | Possible site: 34 |

>>> Seems to have an uncleavable N-term signal seq
ALOM program count: 2 value: −9.61 threshold: 0.0

| | | | | | |
|---|---|---|---|---|---|
| INTEGRAL | Likelihood = | −9.61 | Transmembrane | 50-66 | (45-73) |
| INTEGRAL | Likelihood = | −8.76 | Transmembrane | 13-29 | (7-33) |
| PERIPHERAL | Likelihood = | 25.62 | 32 | | |

modified ALOM score: 2.42
----- Final Results -----

bacterial membrane --- Certainty = 0.4843(Affirmative) <succ>
bacterial outside --- Certainty = 0.0000(Not Clear) <succ>
bacterial cytoplasm --- Certainty = 0.0000(Not Clear) <succ>

[0414] SEQ ID 72 is conserved.

### EXAMPLE 37

[0415] A DNA sequence was identified in S. agalactiae <SEQ ID 73> which encodes the amino acid sequence <SEQ ID 74>. Analysis of this protein sequence reveals the following:

| | |
|---|---|
| Lipop: | Possible site: −1 Crend: 10 |
| McG: | Discrim Score: −13.72 |
| GvH: | Signal Score (−7.5): −5.42 |
| | Possible site: 27 |

>>> Seems to have no N-terminal signal seq.
ALOM program count: 0 value: 3.23 threshold: 0.0

PERIPHERAL Likelihood = 3.23 67

modified ALOM score: −1.15
----- Final Results -----

bacterial cytoplasm --- Certainty = 0.3327(Affirmative) <succ>
bacterial membrane --- Certainty = 0.0000(Not Clear) <succ>
bacterial outside --- Certainty = 0.0000(Not Clear) <succ>

[0416] SEQ ID 74 is predicted to be DNA-binding response regulator.

### EXAMPLE 38

[0417] A DNA sequence was identified in S. agalactiae <SEQ ID 75> which encodes the amino acid sequence <SEQ ID 76>. Analysis of this protein sequence reveals the following:

| | |
|---|---|
| Lipop: | Possible site: −1 Crend: 10 |
| McG: | Discrim Score: −10.31 |
| GvH: | Signal Score (−7.5): −3.3 |
| | Possible site: 44 |

>>> Seems to have no N-terminal signal seq.
ALOM program count: 0 value: 2.17 threshold: 0.0

PERIPHERAL Likelihood = 2.17 277

modified ALOM score: −0.93
----- Final Results -----

bacterial cytoplasm --- Certainty = 0.2221(Affirmative) <succ>
bacterial membrane --- Certainty = 0.0000(Not Clear) <succ>
bacterial outside --- Certainty = 0.0000(Not Clear) <succ>

[0418] SEQ ID 76 is predicted to be transcriptional regulator.

### EXAMPLE 39

[0419] A DNA sequence was identified in S. agalactiae <SEQ ID 77> which encodes the amino acid sequence <SEQ ID 78>. Analysis of this protein sequence reveals the following:

| | |
|---|---|
| Lipop: | Possible site: −1 Crend: 10 |
| McG: | Discrim Score: −10.56 |
| GvH: | Signal Score (−7.5): −5.38 |
| | Possible site: 41 |

>>> Seems to have no N-terminal signal seq.
ALOM program count: 1 value: −1.22 threshold: 0.0

| | | | | | |
|---|---|---|---|---|---|
| INTEGRAL | Likelihood = | −1.22 | Transmembrane | 140-156 | (140-156) |
| PERIPHERAL | Likelihood = | 3.02 | 46 | | |

modified ALOM score: 0.74
----- Final Results -----

bacterial membrane --- Certainty = 0.1489(Affirmative) <succ>
bacterial outside --- Certainty = 0.0000(Not Clear) <succ>
bacterial cytoplasm --- Certainty = 0.0000(Not Clear) <succ>

[0420] SEQ ID 78 is predicted to be acetyl-CoA carboxylase, carboxyl transferase, alpha subunit (accA).

### EXAMPLE 40

[0421] A DNA sequence was identified in S. agalactiae <SEQ ID 79> which encodes the amino acid sequence <SEQ ID 80>. Analysis of this protein sequence reveals the following:

| | |
|---|---|
| Lipop: | Possible site: −1 Crend: 0 |
| McG: | Discrim Score: −17.99 |
| GvH: | Signal Score (−7.5): −4.48 |
| | Possible site: 28 |

>>> Seems to have no N-terminal signal seq.
ALOM program count: 0 value: 4.93 threshold: 0.0

PERIPHERAL Likelihood = 4.93 39

modified ALOM score: −1.49
----- Final Results -----

bacterial cytoplasm --- Certainty = 0.3995(Affirmative) <succ>
bacterial membrane --- Certainty = 0.0000(Not Clear) <succ>
bacterial outside --- Certainty = 0.0000(Not Clear) <succ>

[0422] SEQ ID 80 is conserved.

### EXAMPLE 41

[0423] A DNA sequence was identified in S. agalactiae <SEQ ID 81> which encodes the amino acid sequence <SEQ ID 82>. Analysis of this protein sequence reveals the following:

| | |
|---|---|
| Lipop: | Possible site: −1 Crend: 10 |
| McG: | Discrim Score: −12.43 |
| GvH: | Signal Score (−7.5): −4.88 |
| | Possible site: 53 |

>>> Seems to have no N-terminal signal seq.
ALOM program count: 0 value: 7.21 threshold: 0.0

PERIPHERAL Likelihood = 7.21 39

modified ALOM score: −1.94
----- Final Results -----

bacterial cytoplasm --- Certainty = 0.2962(Affirmative) <succ>
bacterial membrane --- Certainty = 0.0000(Not Clear) <succ>
bacterial outside --- Certainty = 0.0000(Not Clear) <succ>

[0424] SEQ ID 82 is predicted to be ribosome-binding factor A (rbfA).

### EXAMPLE 42

[0425] A DNA sequence was identified in S. agalactiae <SEQ ID 83> which encodes the amino acid sequence <SEQ ID 84>. Analysis of this protein sequence reveals the following:

| | |
|---|---|
| Lipop: | Possible site: −1 Crend: 10 |
| McG: | Discrim Score: −17.53 |
| GvH: | Signal Score (−7.5): −5.73 |
| | Possible site: 27 |

>>> Seems to have no N-terminal signal seq.
ALOM program count: 0 value: 7.96 threshold: 0.0

PERIPHERAL Likelihood = 7.96 116

modified ALOM score: −2.09
----- Final Results -----

bacterial cytoplasm --- Certainty = 0.4152(Affirmative) <succ>
bacterial membrane --- Certainty = 0.0000(Not Clear) <succ>
bacterial outside --- Certainty = 0.0000(Not Clear) <succ>

[0426] SEQ ID 84 is predicted to be R3H domain protein.

### EXAMPLE 43

[0427] A DNA sequence was identified in S. agalactiae <SEQ ID 85> which encodes the amino acid sequence <SEQ ID 86>. Analysis of this protein sequence reveals the following:

| | |
|---|---|
| Lipop: | Possible site: −1 Crend: 8 |
| McG: | Discrim Score: −23.53 |
| GvH: | Signal Score (−7.5): −9.34 |
| | Possible site: 58 |

>>> Seems to have no N-terminal signal seq.
ALOM program count: 0 value: 4.88 threshold: 0.0

PERIPHERAL Likelihood = 4.88 113

modified ALOM score: −1.48
----- Final Results -----

bacterial cytoplasm --- Certainty = 0.6075(Affirmative) <succ>
bacterial membrane --- Certainty = 0.0000(Not Clear) <succ>
bacterial outside --- Certainty = 0.0000(Not Clear) <succ>

[0428] SEQ ID 86 is predicted to be bacteriophage L54a, integrase, truncation.

### EXAMPLE 44

[0429] A DNA sequence was identified in S. agalactiae <SEQ ID 87> which encodes the amino acid sequence <SEQ ID 88>. Analysis of this protein sequence reveals the following:

| | |
|---|---|
| Lipop: | Possible site: −1 Crend: 9 |
| McG: | Discrim Score: −15.39 |
| GvH: | Signal Score (−7.5): −3.96 |
| | Possible site: 54 |

>>> Seems to have no N-terminal signal seq.
ALOM program count: 0 value: 1.38 threshold: 0.0

PERIPHERAL Likelihood = 1.38 118

modified ALOM score: −0.78
----- Final Results -----

bacterial cytoplasm --- Certainty = 0.3370(Affirmative) <succ>
bacterial membrane --- Certainty = 0.0000(Not Clear) <succ>
bacterial outside --- Certainty = 0.0000(Not Clear) <succ>

[0430] SEQ ID 88 is predicted to be acetyltransferase, GNAT family.

### EXAMPLE 45

[0431] A DNA sequence was identified in S. agalactiae <SEQ ID 89> which encodes the amino acid sequence <SEQ ID 90>. Analysis of this protein sequence reveals the following:

| | |
|---|---|
| Lipop: | Possible site: −1 Crend: 0 |
| McG: | Discrim Score: 0.71 |
| GvH: | Signal Score (−7.5): 0.619999 |
| | Possible site: 50 |

>>> Seems to have a cleavable N-term signal seq.
ALOM program count: 0 value: 4.56 threshold: 0.0

PERIPHERAL Likelihood = 4.56 71

modified ALOM score: −1.41
----- Final Results -----

bacterial outside --- Certainty = 0.3000(Affirmative) <succ>
bacterial membrane --- Certainty = 0.0000(Not Clear) <succ>
bacterial cytoplasm --- Certainty = 0.0000(Not Clear) <succ>

[0432] SEQ ID 90 is conserved.

### EXAMPLE 46

[0433] A DNA sequence was identified in S. agalactiae <SEQ ID 91> which encodes the amino acid sequence <SEQ ID 92>. Analysis of this protein sequence reveals the following:

| | |
|---|---|
| Lipop: | Possible site: −1 Crend: 10 |
| McG: | Discrim Score: −12.55 |
| GvH: | Signal Score (−7.5): −7.11 |
| | Possible site: 19 |

>>> Seems to have no N-terminal signal seq.
ALOM program count: 0 value: 2.97 threshold: 0.0

PERIPHERAL Likelihood = 2.97 265

modified ALOM score: −1.09
----- Final Results -----

bacterial cytoplasm --- Certainty = 0.3433(Affirmative) <succ>
bacterial membrane --- Certainty = 0.0000(Not Clear) <succ>
bacterial outside --- Certainty = 0.0000(Not Clear) <succ>

[0434] SEQ ID 92 is conserved.

### EXAMPLE 47

[0435] A DNA sequence was identified in S. agalactiae <SEQ ID 93> which encodes the amino acid sequence <SEQ ID 94>. Analysis of this protein sequence reveals the following:

| | |
|---|---|
| Lipop: | Possible site: −1 Crend: 8 |
| McG: | Discrim Score: −12.55 |
| GvH: | Signal Score (−7.5): −3.4 |
| | Possible site: 44 |

>>> Seems to have no N-terminal signal seq.
ALOM program count: 0 value: 2.28 threshold: 0.0

PERIPHERAL Likelihood = 2.28 32

modified ALOM score: −0.96
----- Final Results -----

bacterial cytoplasm --- Certainty = 0.2691(Affirmative) <succ>
bacterial membrane --- Certainty = 0.0000(Not Clear) <succ>
bacterial outside --- Certainty = 0.0000(Not Clear) <succ>

[0436] SEQ ID 94 is predicted to be anthranilate synthase component II (trpG).

### EXAMPLE 48

[0437] A DNA sequence was identified in S. agalactiae <SEQ ID 95> which encodes the amino acid sequence <SEQ ID 96>. Analysis of this protein sequence reveals the following:

| | |
|---|---|
| Lipop: | Possible site: −1 Crend: 8 |
| McG: | Discrim Score: −10.19 |
| GvH: | Signal Score (−7.5): −5.38 |
| | Possible site: 57 |

>>> Seems to have no N-terminal signal seq.
ALOM program count: 0 value: 1.70 threshold: 0.0

PERIPHERAL Likelihood = 1.70 105

modified ALOM score: −0.84
----- Final Results -----

bacterial cytoplasm --- Certainty = 0.2614(Affirmative) <succ>
bacterial membrane --- Certainty = 0.0000(Not Clear) <succ>
bacterial outside --- Certainty = 0.0000(Not Clear) <succ>

[0438] SEQ ID 96 is predicted to be geranyltranstransferase.

### EXAMPLE 49

[0439] A DNA sequence was identified in S. agalactiae <SEQ ID 97> which encodes the amino acid sequence <SEQ ID 98>. Analysis of this protein sequence reveals the following:

| | |
|---|---|
| Lipop: | Possible site: −1 Crend: 3 |
| McG: | Discrim Score: −18.87 |
| GvH: | Signal Score (−7.5): −7.58 |
| | Possible site: 42 |

>>> Seems to have no N-terminal signal seq.
ALOM program count: 0 value: 6.95 threshold: 0.0

PERIPHERAL Likelihood = 6.95 72

modified ALOM score: −1.89
----- Final Results -----

bacterial cytoplasm --- Certainty = 0.4789(Affirmative) <succ>
bacterial membrane --- Certainty = 0.0000(Not Clear) <succ>
bacterial outside --- Certainty = 0.0000(Not Clear) <succ>

[0440] SEQ ID 98 is conserved.

### EXAMPLE 50

[0441] A DNA sequence was identified in S. agalactiae <SEQ ID 99> which encodes the amino acid sequence <SEQ ID 100>. Analysis of this protein sequence reveals the following:

| | |
|---|---|
| Lipop: | Possible site: −1 Crend: 7 |
| McG: | Discrim Score: −14.71 |
| GvH: | Signal Score (−7.5): −3.82 |
| | Possible site: 50 |

>>> Seems to have no N-terminal signal seq.
ALOM program count: 0 value: 6.84 threshold: 0.0

PERIPHERAL Likelihood = 6.84 45

modified ALOM score: −1.87
----- Final Results -----

bacterial cytoplasm --- Certainty = 0.3205(Affirmative) <succ>
bacterial membrane --- Certainty = 0.0000(Not Clear) <succ>
bacterial outside --- Certainty = 0.0000(Not Clear) <succ>

[0442] SEQ ID 100 is conserved.

### EXAMPLE 51

[0443] A DNA sequence was identified in S. agalactiae <SEQ ID 101> which encodes the amino acid sequence <SEQ ID 102>. Analysis of this protein sequence reveals the following:

| | |
|---|---|
| Lipop: | Possible site: −1 Crend: 4 |
| McG: | Discrim Score: −4.77 |
| GvH: | Signal Score (−7.5): −5.67 |
| | Possible site: 42 |

>>> Seems to have no N-terminal signal seq.
ALOM program count: 0 value: 7.43 threshold: 0.0

PERIPHERAL Likelihood = 7.43 26

modified ALOM score: −1.99
----- Final Results -----

bacterial cytoplasm --- Certainty = 0.1588(Affirmative) <succ>
bacterial membrane --- Certainty = 0.0000(Not Clear) <succ>
bacterial outside --- Certainty = 0.0000(Not Clear) <succ>

[0444] SEQ ID 102 is conserved.

### EXAMPLE 52

[0445] A DNA sequence was identified in S. agalactiae <SEQ ID 103> which encodes the amino acid sequence <SEQ ID 104>. Analysis of this protein sequence reveals the following:

| | |
|---|---|
| Lipop: | Possible site: −1 Crend: 9 |
| McG: | Discrim Score: −30.58 |
| GvH: | Signal Score (−7.5): −7.7 |
| | Possible site: 34 |

>>> Seems to have no N-terminal signal seq.
ALOM program count: 0 value: 17.14 threshold: 0.0

PERIPHERAL Likelihood = 17.14 40

modified ALOM score: −3.93
----- Final Results -----

bacterial cytoplasm --- Certainty = 0.7157(Affirmative) <succ>
bacterial membrane --- Certainty = 0.0000(Not Clear) <succ>
bacterial outside --- Certainty = 0.0000(Not Clear) <succ>

[0446] SEQ ID 104 is conserved.

### EXAMPLE 53

[0447] A DNA sequence was identified in S. agalactiae <SEQ ID 105> which encodes the amino acid sequence <SEQ ID 106>. Analysis of this protein sequence reveals the following:

| | |
|---|---|
| Lipop: | Possible site: −1 Crend: 10 |
| McG: | Discrim Score: −13.19 |
| GvH: | Signal Score (−7.5): −7 |
| | Possible site: 16 |

>>> Seems to have no N-terminal signal seq.
ALOM program count: 0 value: 7.16 threshold: 0.0

PERIPHERAL Likelihood = 7.16 3

modified ALOM score: −1.93
----- Final Results -----

bacterial cytoplasm --- Certainty = 0.3538(Affirmative) <succ>
bacterial membrane --- Certainty = 0.0000(Not Clear) <succ>
bacterial outside --- Certainty = 0.0000(Not Clear) <succ>

### EXAMPLE 54

[0448] A DNA sequence was identified in S. agalactiae<SEQ ID 107> which encodes the amino acid sequence <SEQ ID 108>. Analysis of this protein sequence reveals the following:

| | |
|---|---|
| Lipop: | Possible site: −1 Crend: 9 |
| McG: | Discrim Score: −16.03 |
| GvH: | Signal Score (−7.5): 0.99 |
| | Possible site: 40 |

>>> Seems to have no N-terminal signal seq.
ALOM program count: 0 value: 12.89 threshold: 0.0

PERIPHERAL Likelihood = 12.89 71

modified ALOM score: −3.08
----- Final Results -----

bacterial cytoplasm --- Certainty = 0.2509(Affirmative) <succ>
bacterial membrane --- Certainty = 0.0000(Not Clear) <succ>
bacterial outside --- Certainty = 0.0000(Not Clear) <succ>

[0449] SEQ ID 108 is predicted to be transposase OrfA, 1S3 family.

### EXAMPLE 55

[0450] A DNA sequence was identified in S. agalactiae <SEQ ID 109> which encodes the amino acid sequence <SEQ ID 110>. Analysis of this protein sequence reveals the following:

| | |
|---|---|
| Lipop: | Possible site: −1 Crend: 10 |
| McG: | Discrim Score: −17.01 |
| GvH: | Signal Score (−7.5): −3.03 |
| | Possible site: 51 |

>>> Seems to have no N-terminal signal seq.
ALOM program count: 0 value: 1.96 threshold: 0.0

PERIPHERAL Likelihood = 1.96 148

modified ALOM score: −0.89
----- Final Results -----

bacterial cytoplasm --- Certainty = 0.3508(Affirmative) <succ>
bacterial membrane --- Certainty = 0.0000(Not Clear) <succ>
bacterial outside --- Certainty= 0.0000(Not Clear) <succ>

[0451] SEQ ID 110 is predicted to be D-lactate dehydrogenase (ldhA).

### EXAMPLE 56

[0452] A DNA sequence was identified in S. agalactiae <SEQ ID 111> which encodes the amino acid sequence <SEQ ID 112>. Analysis of this protein sequence reveals the following:

| | |
|---|---|
| Lipop: | Possible site: −1 Crend: 10 |
| McG: | Discrim Score: −11.46 |
| GvH: | Signal Score (−7.5): −1.07 |
| | Possible site: 40 |

>>> Seems to have no N-terminal signal seq.
ALOM program count: 0 value: 1.27 threshold: 0.0

PERIPHERAL Likelihood = 1.27 123

modified ALOM score: −0.75
----- Final Results -----

bacterial cytoplasm --- Certainty = 0.2007(Affirmative) <succ>
bacterial membrane --- Certainty = 0.0000(Not Clear) <succ>
bacterial outside --- Certainty = 0.0000(Not Clear) <succ>

[0453] SEQ ID 112 is predicted to be ribonuclease III (rnc).

### EXAMPLE 57

[0454] A DNA sequence was identified in S. agalactiae <SEQ ID 113> which encodes the amino acid sequence <SEQ ID 114>. Analysis of this protein sequence reveals the following:

| | |
|---|---|
| Lipop: | Possible site: −1 Crend: 1 |
| McG: | Discrim Score: −5.90 |
| GvH: | Signal Score (−7.5): −8.56 |
| | Possible site: 19 |

>>> Seems to have no N-terminal signal seq.
ALOM program count: 0 value: 3.29 threshold: 0.0

PERIPHERAL Likelihood = 3.29 688

modified ALOM score: −1.16
----- Final Results -----

bacterial cytoplasm --- Certainty = 0.2393(Affirmative) <succ>
bacterial membrane --- Certainty = 0.0000(Not Clear) <succ>
bacterial outside --- Certainty = 0.0000(Not Clear) <succ>

[0455] SEQ ID 114 is predicted to be transcriptional accessory protein Tex.

### EXAMPLE 58

[0456] A DNA sequence was identified in S. agalactiae <SEQ ID 115> which encodes the amino acid sequence <SEQ ID 116>. Analysis of this protein sequence reveals the following:

| | |
|---|---|
| Lipop: | Possible site: −1 Crend: 10 |
| McG: | Discrim Score: −13.95 |
| GvH: | Signal Score (−7.5): −6.29 |
| | Possible site: 20 |

>>> Seems to have no N-terminal signal seq.
ALOM program count: 0 value: 12.57 threshold: 0.0

PERIPHERAL Likelihood = 12.57 5

modified ALOM score: −3.01
----- Final Results -----

bacterial cytoplasm --- Certainty = 0.3549(Affirmative) <succ>
bacterial membrane --- Certainty = 0.0000(Not Clear) <succ>
bacterial outside --- Certainty = 0.0000(Not Clear) <succ>

[0457] SEQ ID 116 is conserved.

### EXAMPLE 59

[0458] A DNA sequence was identified in S. agalactiae <SEQ ID 117> which encodes the amino acid sequence <SEQ ID 118>. Analysis of this protein sequence reveals the following:

| | |
|---|---|
| Lipop: | Possible site: −1 Crend: 10 |
| McG: | Discrim Score: −22.65 |
| GvH: | Signal Score (−7.5): −4.43 |
| | Possible site: 55 |

>>> Seems to have no N-terminal signal seq.
ALOM program count: 0 value: 6.26 threshold: 0.0

PERIPHERAL Likelihood = 6.26 29

modified ALOM score: −1.75
----- Final Results -----

bacterial cytoplasm --- Certainty = 0.4916(Affirmative) <succ>
bacterial membrane --- Certainty = 0.0000(Not Clear) <succ>
bacterial outside --- Certainty = 0.0000(Not Clear) <succ>

[0459] SEQ ID 118 is predicted to be conserved domain protein.

### EXAMPLE 60

[0460] A DNA sequence was identified in S. agalactiae <SEQ ID 119> which encodes the amino acid sequence <SEQ ID 120>. Analysis of this protein sequence reveals the following:

| | |
|---|---|
| Lipop: | Possible site: −1 Crend: 8 |
| McG: | Discrim Score: −14.27 |
| GvH: | Signal Score (−7.5): −6.02 |
| | Possible site: 49 |

>>> Seems to have no N-terminal signal seq.
ALOM program count: 0 value: 4.03 threshold: 0.0

PERIPHERAL Likelihood = 4.03 56

modified ALOM score: −1.31
----- Final Results -----

bacterial cytoplasm --- Certainty = 0.3559(Affirmative) <succ>
bacterial membrane --- Certainty = 0.0000(Not Clear) <succ>
bacterial outside --- Certainty = 0.0000(Not Clear) <succ>

[0461] SEQ ID 120 is predicted to be acetyltransferase, GNAT family.

### EXAMPLE 61

[0462] A DNA sequence was identified in S. agalactiae <SEQ ID 121> which encodes the amino acid sequence <SEQ ID 122>. Analysis of this protein sequence reveals the following:

| | |
|---|---|
| Lipop: | Possible site: −1 Crend: 8 |
| McG: | Discrim Score: −8.15 |
| GvH: | Signal Score (−7.5): −5.83 |
| | Possible site: 61 |

>>> Seems to have no N-terminal signal seq.
ALOM program count: 0 value: 3.18 threshold: 0.0

PERIPHERAL Likelihood = 3.18 230

modified ALOM score: −1.14
----- Final Results -----

bacterial cytoplasm --- Certainty = 0.2296(Affirmative) <succ>
bacterial membrane --- Certainty = 0.0000(Not Clear) <succ>
bacterial outside --- Certainty = 0.0000(Not Clear) <succ>

[0463] SEQ ID 122 is predicted to be nucleoside diphosphate kinase domain protein.

### EXAMPLE 62

[0464] A DNA sequence was identified in S. agalactiae <SEQ ID 123> which encodes the amino acid sequence <SEQ ID 124>. Analysis of this protein sequence reveals the following:

| | |
|---|---|
| Lipop: | Possible site: −1 Crend: 10 |
| McG: | Discrim Score: −20.24 |
| GvH: | Signal Score (−7.5): −6.61 |
| | Possible site: 61 |

>>> Seems to have no N-terminal signal seq.
ALOM program count: 0 value: 6.47 threshold: 0.0

PERIPHERAL Likelihood = 6.47 111

modified ALOM score: −1.79
----- Final Results -----

bacterial cytoplasm --- Certainty = 0.4870(Affirmative) <succ>
bacterial membrane --- Certainty = 0.0000(Not Clear) <succ>
bacterial outside --- Certainty = 0.0000(Not Clear) <succ>

[0465] SEQ ID 124 is predicted to be Tn916.

### EXAMPLE 63

[0466] A DNA sequence was identified in S. agalactiae <SEQ ID 125> which encodes the amino acid sequence <SEQ ID 126>. Analysis of this protein sequence reveals the following:

| | |
|---|---|
| Lipop: | Possible site: −1 Crend: 7 |
| McG: | Discrim Score: −14.87 |
| GvH: | Signal Score (−7.5): −4.02 |
| | Possible site: 28 |

>>> Seems to have no N-terminal signal seq.
ALOM program count: 0 value: 8.91 threshold: 0.0

PERIPHERAL Likelihood = 8.91 112

modified ALOM score: −2.28
----- Final Results -----

bacterial cytoplasm --- Certainty = 0.3279(Affirmative) <succ>
bacterial membrane --- Certainty = 0.0000(Not Clear) <succ>
bacterial outside --- Certainty = 0.0000(Not Clear) <succ>

[0467] SEQ ID 126 is predicted to be cytidine deaminase (cdd).

### EXAMPLE 64

[0468] A DNA sequence was identified in S. agalactiae <SEQ ID 127> which encodes the amino acid sequence <SEQ ID 128>. Analysis of this protein sequence reveals the following:

| | |
|---|---|
| Lipop: | Possible site: −1 Crend: 10 |
| McG: | Discrim Score: −8.61 |
| GvH: | Signal Score (−7.5): −7.88 |
| | Possible site: 32 |

>>> Seems to have no N-terminal signal seq.
ALOM program count: 0 value: 14.75 threshold: 0.0

PERIPHERAL Likelihood = 14.75 76

modified ALOM score: −3.45
----- Final Results -----

bacterial cytoplasm --- Certainty = 0.2798(Affirmative) <succ>
bacterial membrane --- Certainty = 0.0000(Not Clear) <succ>
bacterial outside --- Certainty = 0.0000(Not Clear) <succ>

[0469] SEQ ID 128 is conserved.

### EXAMPLE 65

[0470] A DNA sequence was identified in S. agalactiae <SEQ ID 129> which encodes the amino acid sequence <SEQ ID 130>. Analysis of this protein sequence reveals the following:

| | |
|---|---|
| Lipop: | Possible site: −1 Crend: 10 |
| McG: | Discrim Score: −12.49 |
| GvH: | Signal Score (−7.5): −9.71 |
| | Possible site: 22 |

>>> Seems to have no N-terminal signal seq.
ALOM program count: 0 value: 0.26 threshold: 0.0

PERIPHERAL Likelihood = 0.26 76

modified ALOM score: −0.55
----- Final Results -----

bacterial cytoplasm --- Certainty = 0.3940(Affirmative) <succ>
bacterial membrane --- Certainty = 0.0000(Not Clear) <succ>
bacterial outside --- Certainty = 0.0000(Not Clear) <succ>

[0471] SEQ ID 130 is predicted to be dihydroorotase, multifunctional complex type (pyrC).

### EXAMPLE 66

[0472] A DNA sequence was identified in S. agalactiae <SEQ ID 131> which encodes the amino acid sequence <SEQ ID 132>. Analysis of this protein sequence reveals the following:

| | |
|---|---|
| Lipop: | Possible site: −1 Crend: 1 |
| McG: | Discrim Score: −6.23 |
| GvH: | Signal Score (−7.5): −7.98 |
| | Possible site: 29 |

>>> Seems to have no N-terminal signal seq.
ALOM program count: 0 value: 6.10 threshold: 0.0

PERIPHERAL Likelihood = 6.10 84

modified ALOM score: −1.72
----- Final Results -----

bacterial cytoplasm --- Certainty = 0.2341(Affirmative) <succ>
bacterial membrane --- Certainty = 0.0000(Not Clear) <succ>
bacterial outside --- Certainty = 0.0000(Not Clear) <succ>

[0473] SEQ ID 132 is predicted to be flavoprotein-related protein.

### EXAMPLE 67

[0474] A DNA sequence was identified in S. agalactiae <SEQ ID 133> which encodes the amino acid sequence <SEQ ID 134>. Analysis of this protein sequence reveals the following:

| | |
|---|---|
| Lipop: | Possible site: −1 Crend: 4 |
| McG: | Discrim Score: −6.04 |
| GvH: | Signal Score (−7.5): −6.37 |
| | Possible site: 15 |

>>> Seems to have no N-terminal signal seq.
ALOM program count: 0 value: 3.76 threshold: 0.0

PERIPHERAL Likelihood = 3.76 308

modified ALOM score: −1.25
----- Final Results -----

bacterial cytoplasm --- Certainty = 0.1981(Affirmative) <succ>
bacterial membrane --- Certainty = 0.0000(Not Clear) <succ>
bacterial outside --- Certainty = 0.0000(Not Clear) <succ>

[0475] SEQ ID 134 is predicted to be cysteine desulphurase (iscS).

### EXAMPLE 68

[0476] A DNA sequence was identified in S. agalactiae <SEQ ID 135> which encodes the amino acid sequence <SEQ ID 136>. Analysis of this protein sequence reveals the following:

| | |
|---|---|
| Lipop: | Possible site: −1 Crend: 10 |
| McG: | Discrim Score: −10.75 |
| GvH: | Signal Score (−7.5): −5.76 |
| | Possible site: 41 |

>>> Seems to have no N-terminal signal seq.
ALOM program count: 0 value: 2.49 threshold: 0.0

PERIPHERAL Likelihood = 2.49 162

modified ALOM score: −1.00
----- Final Results -----

bacterial cytoplasm --- Certainty = 0.2802(Affirmative) <succ>
bacterial membrane --- Certainty = 0.0000(Not Clear) <succ>
bacterial outside --- Certainty = 0.0000(Not Clear) <succ>

[0477] SEQ ID 136 is predicted to be DNA-binding protein.

### EXAMPLE 69

[0478] A DNA sequence was identified in S. agalactiae <SEQ ID 137> which encodes the amino acid sequence <SEQ ID 138>. Analysis of this protein sequence reveals the following:

| | |
|---|---|
| Lipop: | Possible site: −1 Crend: 5 |
| McG: | Discrim Score: −11.91 |
| GvH: | Signal Score (−7.5): −7.15 |
| | Possible site: 26 |

>>> Seems to have no N-terminal signal seq.
ALOM program count: 0 value: 1.75 threshold: 0.0

PERIPHERAL Likelihood = 1.75 292

modified ALOM score: −0.85
----- Final Results -----

bacterial cytoplasm --- Certainty = 0.3312(Affirmative) <succ>
bacterial membrane --- Certainty = 0.0000(Not Clear) <succ>
bacterial outside --- Certainty = 0.0000(Not Clear) <succ>

[0479] SEQ ID 138 is predicted to be ribosomal protein S1 (rpsA).

### EXAMPLE 70

[0480] A DNA sequence was identified in S. agalactiae <SEQ ID 139> which encodes the amino acid sequence <SEQ ID 140>. Analysis of this protein sequence reveals the following:

| | |
|---|---|
| Lipop: | Possible site: −1 Crend: 9 |
| McG: | Discrim Score: −0.79 |
| GvH: | Signal Score (−7.5): −2.01 |
| | Possible site: 58 |

>>> Seems to have no N-terminal signal seq.
ALOM program count: 0 value: 4.29 threshold: 0.0

PERIPHERAL Likelihood = 4.29 16

modified ALOM score: −1.36
----- Final Results -----

bacterial cytoplasm --- Certainty = 0.0060(Affirmative) <succ>
bacterial membrane --- Certainty = 0.0000(Not Clear) <succ>
bacterial outside --- Certainty = 0.0000(Not Clear) <succ>

[0481] SEQ ID 140 is predicted to be MutT/nudix family protein.

### EXAMPLE 71

[0482] A DNA sequence was identified in S. agalactiae <SEQ ID 141> which encodes the amino acid sequence <SEQ ID 142>. Analysis of this protein sequence reveals the following:

| | |
|---|---|
| Lipop: | Possible site: −1 Crend: 4 |
| McG: | Discrim Score: −11.70 |
| GvH: | Signal Score (−7.5): −2.55 |
| | Possible site: 29 |

>>> Seems to have no N-terminal signal seq.
ALOM program count: 0 value: 5.83 threshold: 0.0

PERIPHERAL Likelihood = 5.83 69

modified ALOM score: −1.67
----- Final Results -----

bacterial cytoplasm --- Certainty = 0.2350(Affirmative) <succ>
bacterial membrane --- Certainty = 0.0000(Not Clear) <succ>
bacterial outside --- Certainty = 0.0000(Not Clear) <succ>

[0483] SEQ ID 142 is conserved.

### EXAMPLE 72

[0484] A DNA sequence was identified in S. agalactiae <SEQ ID 143> which encodes the amino acid sequence <SEQ ID 144>. Analysis of this protein sequence reveals the following:

| | |
|---|---|
| Lipop: | Possible site: −1 Crend: 9 |
| McG: | Discrim Score: −16.03 |
| GvH: | Signal Score (−7.5): 0.44 |
| | Possible site: 40 |

>>> Seems to have no N-terminal signal seq.
ALOM program count: 0 value: 14.16 threshold: 0.0

PERIPHERAL Likelihood = 14.16 27

modified ALOM score: −3.33
----- Final Results -----

bacterial cytoplasm --- Certainty = 0.2619(Affirmative) <succ>
bacterial membrane --- Certainty = 0.0000(Not Clear) <succ>
bacterial outside --- Certainty = 0.0000(Not Clear) <succ>

[0485] SEQ ID 144 is predicted to be transposase OrfA, IS3 family.

### EXAMPLE 73

[0486] A DNA sequence was identified in S. agalactiae <SEQ ID 145> which encodes the amino acid sequence <SEQ ID 146>. Analysis of this protein sequence reveals the following:

| | |
|---|---|
| Lipop: | Possible site: −1 Crend: 8 |
| McG: | Discrim Score: −13.64 |
| GvH: | Signal Score (−7.5): −1.95 |
| | Possible site: 16 |

>>> Seems to have no N-terminal signal seq.
ALOM program count: 0 value: 2.38 threshold: 0.0

PERIPHERAL Likelihood = 2.38 124

modified ALOM score: −0.98
----- Final Results -----

bacterial cytoplasm --- Certainty = 0.2618(Affirmative) <succ>
bacterial membrane --- Certainty = 0.0000(Not Clear) <succ>
bacterial outside --- Certainty = 0.0000(Not Clear) <succ>

[0487] SEQ ID 146 is predicted to be ISSdyl, transposase OrfB.

### EXAMPLE 74

[0488] A DNA sequence was identified in S. agalactiae <SEQ ID 147> which encodes the amino acid sequence <SEQ ID 148>. Analysis of this protein sequence reveals the following:

| | |
|---|---|
| Lipop: | Possible site: −1 Crend: 6 |
| McG: | Discrim Score: −11.45 |
| GvH: | Signal Score (−7.5): −8.98 |
| | Possible site: 47 |

>>> Seems to have no N-terminal signal seq.
ALOM program count: 0 value: 10.13 threshold: 0.0

PERIPHERAL Likelihood = 10.13 2

modified ALOM score: −2.53
----- Final Results -----

bacterial cytoplasm --- Certainty = 0.3585(Affirmative) <succ>
bacterial membrane --- Certainty = 0.0000(Not Clear) <succ>
bacterial outside --- Certainty = 0.0000(Not Clear) <succ>

[0489] SEQ ID 148 is predicted to be IS861, transposase OrfB, truncation.

### EXAMPLE 75

[0490] A DNA sequence was identified in S. agalactiae <SEQ ID 149> which encodes the amino acid sequence <SEQ ID 150>. Analysis of this protein sequence reveals the following:

| | |
|---|---|
| Lipop: | Possible site: −1 Crend: 9 |
| McG: | Discrim Score: −14.51 |
| GvH: | Signal Score (−7.5): −8.11 |
| | Possible site: 47 |

>>> Seems to have no N-terminal signal seq.
ALOM program count: 0 value: 11.62 threshold: 0.0

PERIPHERAL Likelihood = 11.62 44

modified ALOM score: −2.82
----- Final Results -----

bacterial cytoplasm --- Certainty = 0.4025(Affirmative) <succ>
bacterial membrane --- Certainty = 0.0000(Not Clear) <succ>
bacterial outside --- Certainty = 0.0000(Not Clear) <succ>

[0491] SEQ ID 150 is conserved.

### EXAMPLE 76

[0492] A DNA sequence was identified in S. agalactiae <SEQ ID 151> which encodes the amino acid sequence <SEQ ID 152>. Analysis of this protein sequence reveals the following:

| | |
|---|---|
| Lipop: | Possible site: −1 Crend: 10 |
| McG: | Discrim Score: 1.37 |
| GvH: | Signal Score (−7.5): −3.76 |
| | Possible site: 24 |

>>> Seems to have an uncleavable N-term signal seq
ALOM program count: 0 value: 2.01 threshold: 0.0

PERIPHERAL Likelihood = 2.01 13

modified ALOM score: −0.90
----- Final Results -----

bacterial membrane --- Certainty = 0.0000(Not Clear) <succ>
bacterial outside --- Certainty = 0.0000(Not Clear) <succ>
bacterial cytoplasm --- Certainty = 0.0000(Not Clear) <succ>

[0493] SEQ ID 152 is predicted to be ribosomal protein L10 (rplJ).

### EXAMPLE 77

[0494] A DNA sequence was identified in S. agalactiae <SEQ ID 153> which encodes the amino acid sequence <SEQ ID 154>. Analysis of this protein sequence reveals the following:

| | |
|---|---|
| Lipop: | Possible site: −1 Crend: 6 |
| McG: | Discrim Score: −7.41 |
| GvH: | Signal Score (−7.5): −0.33 |
| | Possible site: 58 |

>>> Seems to have no N-terminal signal seq.
ALOM program count: 0 value: 3.55 threshold: 0.0

PERIPHERAL Likelihood = 3.55 274

modified ALOM score: −1.21
----- Final Results -----

bacterial cytoplasm --- Certainty = 0.1048(Affirmative) <succ>
bacterial membrane --- Certainty = 0.0000(Not Clear) <succ>
bacterial outside --- Certainty = 0.0000(Not Clear) <succ>

[0495] SEQ ID 154 is predicted to be HMG-CoA synthase.

### EXAMPLE 78

[0496] A DNA sequence was identified in S. agalactiae <SEQ ID 155> which encodes the amino acid sequence <SEQ ID 156>. Analysis of this protein sequence reveals the following:

| | |
|---|---|
| Lipop: | Possible site: −1 Crend: 7 |
| McG: | Discrim Score: −11.18 |
| GvH: | Signal Score (−7.5): −6.54 |
| | Possible site: 17 |

>>> Seems to have no N-terminal signal seq.
ALOM program count: 0 value: 4.35 threshold: 0.0

PERIPHERAL Likelihood = 4.35 140

modified ALOM score: −1.37
----- Final Results -----

bacterial cytoplasm --- Certainty = 0.3043(Affirmative) <succ>
bacterial membrane --- Certainty = 0.0000(Not Clear) <succ>
bacterial outside --- Certainty = 0.0000(Not Clear) <succ>

[0497] SEQ ID 156 is predicted to be 16S rRNA processing protein RimM (rimM).

### EXAMPLE 79

[0498] A DNA sequence was identified in S. agalactiae <SEQ ID 157> which encodes the amino acid sequence <SEQ ID 158>. Analysis of this protein sequence reveals the following:

| | |
|---|---|
| Lipop: | Possible site: −1 Crend: 10 |
| McG: | Discrim Score: −24.00 |
| GvH: | Signal Score (−7.5): −2.33 |
| | Possible site: 33 |

>>> Seems to have no N-terminal signal seq.
ALOM program count: 0 value: 10.61 threshold: 0.0

PERIPHERAL Likelihood = 10.61 29

modified ALOM score: −2.62
----- Final Results -----

bacterial cytoplasm --- Certainty = 0.4767(Affirmative) <succ>
bacterial membrane --- Certainty = 0.0000(Not Clear) <succ>
bacterial outside --- Certainty = 0.0000(Not Clear) <succ>

[0499] SEQ ID 158 is predicted to be ribosomal protein L27 (rpmA).

### EXAMPLE 80

[0500] A DNA sequence was identified in S. agalactiae <SEQ ID 159> which encodes the amino acid sequence <SEQ ID 160>. Analysis of this protein sequence reveals the following:

| | |
|---|---|
| Lipop: | Possible site: −1 Crend: 8 |
| McG: | Discrim Score: −20.57 |
| GvH: | Signal Score (−7.5): −5.49 |
| | Possible site: 45 |

>>> Seems to have no N-terminal signal seq.
ALOM program count: 0 value: 2.92 threshold: 0.0

PERIPHERAL Likelihood = 2.92 371

modified ALOM score: −1.08
----- Final Results -----

bacterial cytoplasm --- Certainty = 0.4711(Affirmative) <succ>
bacterial membrane --- Certainty = 0.0000(Not Clear) <succ>
bacterial outside --- Certainty = 0.0000(Not Clear) <succ>

[0501] SEQ ID 160 is predicted to be thiamine biosynthesis protein ThiI (thiI).

### EXAMPLE 81

[0502] A DNA sequence was identified in S. agalactiae <SEQ ID 161> which encodes the amino acid sequence <SEQ ID 162>. Analysis of this protein sequence reveals the following:

| | |
|---|---|
| Lipop: | Possible site: −1 Crend: 4 |
| McG: | Discrim Score: −8.37 |
| GvH: | Signal Score (−7.5): −4.96 |
| | Possible site: 43 |

>>> Seems to have no N-terminal signal seq.
ALOM program count: 0 value: 6.52 threshold: 0.0

PERIPHERAL Likelihood = 6.52 36

modified ALOM score: −1.80
----- Final Results -----

bacterial cytoplasm --- Certainty = 0.2166(Affirmative) <succ>
bacterial membrane --- Certainty = 0.0000(Not Clear) <succ>
bacterial outside --- Certainty = 0.0000(Not Clear) <succ>

[0503] SEQ ID 162 is predicted to be RNA polymerase sigma-70 factor (rpoD).

### EXAMPLE 82

[0504] A DNA sequence was identified in S. agalactiae <SEQ ID 163> which encodes the amino acid sequence <SEQ ID 164>. Analysis of this protein sequence reveals the following:

| | |
|---|---|
| Lipop: | Possible site: −1 Crend: 8 |
| McG: | Discrim Score: −12.31 |
| GvH: | Signal Score (−7.5): −7.51 |
| | Possible site: 13 |

>>> Seems to have no N-terminal signal seq.
ALOM program count: 0 value: 4.29 threshold: 0.0

PERIPHERAL Likelihood = 4.29 20

modified ALOM score: −1.36
----- Final Results -----

bacterial cytoplasm --- Certainty = 0.3464(Affirmative) <succ>
bacterial membrane --- Certainty = 0.0000(Not Clear) <succ>
bacterial outside --- Certainty = 0.0000(Not Clear) <succ>

[0505] SEQ ID 164 is predicted to be DNA primase (dnaG).

### EXAMPLE 83

[0506] A DNA sequence was identified in S. agalactiae <SEQ ID 165> which encodes the amino acid sequence <SEQ ID 166>. Analysis of this protein sequence reveals the following:

| | |
|---|---|
| Lipop: | Possible site: −1 Crend: 9 |
| McG: | Discrim Score: −19.58 |
| GvH: | Signal Score (−7.5): −6.45 |
| | Possible site: 26 |

>>> Seems to have no N-terminal signal seq.
ALOM program count: 0 value: 21.01 threshold: 0.0

PERIPHERAL Likelihood = 21.01 13

modified ALOM score: −4.70
----- Final Results -----

bacterial cytoplasm --- Certainty = 0.4706(Affirmative) <succ>
bacterial membrane --- Certainty = 0.0000(Not Clear) <succ>
bacterial outside --- Certainty = 0.0000(Not Clear) <succ>

[0507] SEQ ID 166 is predicted to be ribosomal protein S21 (rpsU).

### EXAMPLE 84

[0508] A DNA sequence was identified in S. agalactiae <SEQ ID 167> which encodes the amino acid sequence <SEQ ID 168>. Analysis of this protein sequence reveals the following:

| | |
|---|---|
| Lipop: | Possible site: −1 Crend: 0 |
| McG: | Discrim Score: 13.58 |
| GvH: | Signal Score (−7.5): −5.58 |
| | Possible site: 13 |

>>> Seems to have an uncleavable N-term signal seq
ALOM program count: 2 value: −14.65 threshold: 0.0

| | | | | | |
|---|---|---|---|---|---|
| INTEGRAL | Likelihood = | −14.65 | Transmembrane | 4-20 | (1-26) |
| INTEGRAL | Likelihood = | −10.93 | Transmembrane | 59-75 | (52-77) |
| PERIPHERAL | Likelihood = | 17.40 | 38 | | |

modified ALOM score: 3.43
----- Final Results -----

bacterial membrane --- Certainty = 0.6859(Affirmative) <succ>
bacterial outside --- Certainty = 0.0000(Not Clear) <succ>
bacterial cytoplasm --- Certainty = 0.0000(Not Clear) <succ>

[0509] SEQ ID 168 is predicted to be preprotein translocase, SecG subunit.

### EXAMPLE 85

[0510] A DNA sequence was identified in S. agalactiae <SEQ ID 169> which encodes the amino acid sequence <SEQ ID 170>. Analysis of this protein sequence reveals the following:

| | |
|---|---|
| Lipop: | Possible site: −1 Crend: 1 |
| McG: | Discrim Score: 9.62 |
| GvH: | Signal Score (−7.5): −4.03 |
| | Possible site: 53 |

>>> Seems to have an uncleavable N-term signal seq
ALOM program count: 3 value: −4.09 threshold: 0.0

| | | | | | |
|---|---|---|---|---|---|
| INTEGRAL | Likelihood = | −4.09 | Transmembrane | 29-45 | (28-48) |
| INTEGRAL | Likelihood = | −0.85 | Transmembrane | 8-24 | (7-24) |
| INTEGRAL | Likelihood = | −0.32 | Transmembrane | 62-78 | (62-78) |
| PERIPHERAL | Likelihood = | 26.74 | 45 | | |

modified ALOM score: 1.32
----- Final Results -----

bacterial membrane --- Certainty = 0.2635(Affirmative) <succ>
bacterial outside --- Certainty = 0.0000(Not Clear) <succ>
bacterial cytoplasm --- Certainty = 0.0000(Not Clear) <succ>

[0511] SEQ ID 170 is predicted to be a protease.

### EXAMPLE 86

[0512] A DNA sequence was identified in S. agalactiae <SEQ ID 171> which encodes the amino acid sequence <SEQ ID 172>. Analysis of this protein sequence reveals the following:

| | |
|---|---|
| Lipop: | Possible site: −1 Crend: 7 |
| McG: | Discrim Score: −9.30 |
| GvH: | Signal Score (−7.5): −3.84 |
| | Possible site: 56 |

>>> Seems to have no N-terminal signal seq.
ALOM program count: 1 value: −0.32 threshold: 0.0

| | | | | | |
|---|---|---|---|---|---|
| INTEGRAL | Likelihood = | −0.32 | Transmembrane | 157-173 | (157-173) |
| PERIPHERAL | Likelihood = | 5.04 | 43 | | |

modified ALOM score: 0.56
----- Final Results -----

bacterial membrane --- Certainty = 0.1128(Affirmative) <succ>
bacterial outside --- Certainty = 0.0000(Not Clear) <succ>
bacterial cytoplasm --- Certainty = 0.0000(Not Clear) <succ>

[0513] SEQ ID 172 is predicted to be peptide ABC transporter, ATP-binding protein.

### EXAMPLE 87

[0514] A DNA sequence was identified in S. agalactiae <SEQ ID 173> which encodes the amino acid sequence <SEQ ID 174>. Analysis of this protein sequence reveals the following:

| | |
|---|---|
| Lipop: | Possible site: −1 Crend: 10 |
| McG: | Discrim Score: −6.90 |
| GvH: | Signal Score (−7.5): 0.25 |
| | Possible site: 36 |

>>> Seems to have no N-terminal signal seq.
ALOM program count: 0 value: 1.38 threshold: 0.0

PERIPHERAL Likelihood = 1.38 71

modified ALOM score: −0.78
----- Final Results -----

bacterial cytoplasm --- Certainty = 0.0830(Affirmative) <succ>
bacterial membrane --- Certainty = 0.0000(Not Clear) <succ>
bacterial outside --- Certainty = 0.0000(Not Clear) <succ>

[0515] SEQ ID 174 is conserved.

### EXAMPLE 88

[0516] A DNA sequence was identified in S. agalactiae <SEQ ID 175> which encodes the amino acid sequence <SEQ ID 176>. Analysis of this protein sequence reveals the following:

| | |
|---|---|
| Lipop: | Possible site: −1 Crend: 3 |
| McG: | Discrim Score: 24.24 |
| GvH: | Signal Score (−7.5): −1.68 |
| | Possible site: 41 |

>>> Seems to have a cleavable N-term signal seq.
ALOM program count: 10 value: −9.66 threshold: 0.0

| | | | | | |
|---|---|---|---|---|---|
| INTEGRAL | Likelihood = | −9.66 | Transmembrane | 359-375 | (355-378) |
| INTEGRAL | Likelihood = | −8.01 | Transmembrane | 156-172 | (145-175) |
| INTEGRAL | Likelihood = | −6.64 | Transmembrane | 434-450 | (432-453) |
| INTEGRAL | Likelihood = | −5.79 | Transmembrane | 81-97 | (78-98) |
| INTEGRAL | Likelihood = | −5.20 | Transmembrane | 238-254 | (231-258) |
| INTEGRAL | Likelihood = | −4.14 | Transmembrane | 45-61 | (42-63) |
| INTEGRAL | Likelihood = | −3.98 | Transmembrane | 291-307 | (288-309) |
| INTEGRAL | Likelihood = | −3.72 | Transmembrane | 118-134 | (117-137) |
| INTEGRAL | Likelihood = | −2.28 | Transmembrane | 199-215 | (199-218) |
| INTEGRAL | Likelihood = | −0.80 | Transmembrane | 331-347 | (331-347) |
| PERIPHERAL | Likelihood = | 3.02 | 411 | | |

modified ALOM score: 2.43
----- Final Results -----

bacterial membrane --- Certainty = 0.4864(Affirmative) <succ>
bacterial outside --- Certainty = 0.0000(Not Clear) <succ>
bacterial cytoplasm --- Certainty = 0.0000(Not Clear) <succ>

[0517] SEQ ID 176 is predicted to be branched-chain amino acid transport system II carrier protein (brnQ).

### EXAMPLE 89

[0518] A DNA sequence was identified in S. agalactiae <SEQ ID 177> which encodes the amino acid sequence <SEQ ID 178>. Analysis of this protein sequence reveals the following:

| | |
|---|---|
| Lipop: | Possible site: −1 Crend: 10 |
| McG: | Discrim Score: −16.49 |
| GvH: | Signal Score (−7.5): −0.0300007 |
| | Possible site: 47 |

>>> Seems to have no N-terminal signal seq.
ALOM program count: 0 value: 3.39 threshold: 0.0

PERIPHERAL Likelihood = 3.39 222

modified ALOM score: −1.18
----- Final Results -----

bacterial cytoplasm --- Certainty = 0.2803(Affirmative) <succ>
bacterial membrane --- Certainty = 0.0000(Not Clear) <succ>
bacterial outside --- Certainty = 0.0000(Not Clear) <succ>

[0519] SEQ ID 178 is predicted to be aminotransferase, class I.

### EXAMPLE 90

[0520] A DNA sequence was identified in S. agalactiae <SEQ ID 179> which encodes the amino acid sequence <SEQ ID 180>. Analysis of this protein sequence reveals the following:

| | |
|---|---|
| Lipop: | Possible site: −1 Crend: 10 |
| McG: | Discrim Score: −11.93 |
| GvH: | Signal Score (−7.5): −0.770001 |
| | Possible site: 42 |

>>> Seems to have no N-terminal signal seq.
ALOM program count: 0 value: 3.34 threshold: 0.0

PERIPHERAL Likelihood = 3.34 788

modified ALOM score: −1.17
----- Final Results -----

bacterial cytoplasm --- Certainty = 0.2040(Affirmative) <succ>
bacterial membrane --- Certainty = 0.0000(Not Clear) <succ>
bacterial outside --- Certainty = 0.0000(Not Clear) <succ>

[0521] SEQ ID 180 is predicted to be excinuclease ABC, A subunit (uvrA).

### EXAMPLE 91

[0522] A DNA sequence was identified in S. agalactiae <SEQ ID 181> which encodes the amino acid sequence <SEQ ID 182>. Analysis of this protein sequence reveals the following:

| | |
|---|---|
| Lipop: | Possible site: −1 Crend: 9 |
| McG: | Discrim Score: −10.92 |
| GvH: | Signal Score (−7.5): −7.85 |
| | Possible site: 40 |

>>> Seems to have no N-terminal signal seq.
ALOM program count: 0 value: 5.04 threshold: 0.0

PERIPHERAL Likelihood = 5.04 340

modified ALOM score: −1.51
----- Final Results -----

bacterial cytoplasm --- Certainty = 0.3254(Affirmative) <succ>
bacterial membrane --- Certainty = 0.0000(Not Clear) <succ>
bacterial outside --- Certainty = 0.0000(Not Clear) <succ>

[0523] SEQ ID 182 is predicted to be MutS2 family protein.

### EXAMPLE 92

[0524] A DNA sequence was identified in S. agalactiae <SEQ ID 183> which encodes the amino acid sequence <SEQ ID 184>. Analysis of this protein sequence reveals the following:

| | |
|---|---|
| Lipop: | Possible site: −1 Crend: 10 |
| McG: | Discrim Score: −20.42 |
| GvH: | Signal Score (−7.5): −3.77 |
| | Possible site: 35 |

>>> Seems to have no N-terminal signal seq.
ALOM program count: 0 value: 0.69 threshold: 0.0

PERIPHERAL Likelihood = 0.69 164

modified ALOM score: −0.64
----- Final Results -----

bacterial cytoplasm --- Certainty = 0.4338(Affirmative) <succ>
bacterial membrane --- Certainty = 0.0000(Not Clear) <succ>
bacterial outside --- Certainty = 0.0000(Not Clear) <succ>

[0525] SEQ ID 184 is predicted to be ribonuclease Hill (rnhC).

### EXAMPLE 93

[0526] A DNA sequence was identified in S. agalactiae <SEQ ID 185> which encodes the amino acid sequence <SEQ ID 186>. Analysis of this protein sequence reveals the following:

| | |
|---|---|
| Lipop: | Possible site: −1 Crend: 8 |
| McG: | Discrim Score: −12.18 |
| GvH: | Signal Score (−7.5): −6.61 |
| | Possible site: 26 |

>>> Seems to have no N-terminal signal seq.
ALOM program count: 0 value: 0.95 threshold: 0.0

PERIPHERAL Likelihood = 0.95 56

modified ALOM score: −0.69
----- Final Results -----

bacterial cytoplasm --- Certainty = 0.3257(Affirmative) <succ>
bacterial membrane --- Certainty = 0.0000(Not Clear) <succ>
bacterial outside --- Certainty = 0.0000(Not Clear) <succ>

[0527] SEQ ID 186 is conserved.

### EXAMPLE 94

[0528] A DNA sequence was identified in S. agalactiae <SEQ ID 187> which encodes the amino acid sequence <SEQ ID 188>. Analysis of this protein sequence reveals the following:

| | |
|---|---|
| Lipop: | Possible site: −1 Crend: 10 |
| McG: | Discrim Score: −8.34 |
| GvH: | Signal Score (−7.5): −3.13 |
| | Possible site: 46 |

>>> Seems to have no N-terminal signal seq.
ALOM program count: 0 value: 5.36 threshold: 0.0

PERIPHERAL Likelihood = 5.36 128

modified ALOM score: −1.57
----- Final Results -----

bacterial cytoplasm --- Certainty = 0.1795(Affirmative) <succ>
bacterial membrane --- Certainty = 0.0000(Not Clear) <succ>
bacterial outside --- Certainty = 0.0000(Not Clear) <succ>

[0529] SEQ ID 188 is predicted to be exonuclease.

### EXAMPLE 95

[0530] A DNA sequence was identified in S. agalactiae <SEQ ID 189> which encodes the amino acid sequence <SEQ ID 190>. Analysis of this protein sequence reveals the following:

| | |
|---|---|
| Lipop: | Possible site: −1 Crend: 7 |
| McG: | Discrim Score: −11.92 |
| GvH: | Signal Score (−7.5): −5.74 |
| | Possible site: 58 |

>>> Seems to have no N-terminal signal seq.
ALOM program count: 0 value: 7.69 threshold: 0.0

PERIPHERAL Likelihood = 7.69 67

modified ALOM score: −2.04
----- Final Results -----

bacterial cytoplasm --- Certainty = 0.3031(Affirmative) <succ>
bacterial membrane --- Certainty = 0.0000(Not Clear) <succ>
bacterial outside --- Certainty = 0.0000(Not Clear) <succ>

[0531] SEQ ID 190 is predicted to be primase-related protein.

### EXAMPLE 96

[0532] A DNA sequence was identified in S. agalactiae <SEQ ID 191> which encodes the amino acid sequence <SEQ ID 192>. Analysis of this protein sequence reveals the following:

| | |
|---|---|
| Lipop: | Possible site: −1 Crend: 8 |
| McG: | Discrim Score: −18.44 |
| GvH: | Signal Score (−7.5): −7.91 |
| | Possible site: 28 |

>>> Seems to have no N-terminal signal seq.
ALOM program count: 0 value: 13.79 threshold: 0.0

PERIPHERAL Likelihood = 13.79 46

modified ALOM score: −3.26
----- Final Results -----

bacterial cytoplasm --- Certainty = 0.4769(Affirmative) <succ>
bacterial membrane --- Certainty = 0.0000(Not Clear) <succ>
bacterial outside --- Certainty = 0.0000(Not Clear) <succ>

### EXAMPLE 97

[0533] A DNA sequence was identified in S. agalactiae <SEQ ID 193> which encodes the amino acid sequence <SEQ ID 194>. Analysis of this protein sequence reveals the following:

| | |
|---|---|
| Lipop: | Possible site: −1 Crend: 10 |
| McG: | Discrim Score: −10.43 |
| GvH: | Signal Score (−7.5): −5.4 |
| | Possible site: 20 |

>>> Seems to have no N-terminal signal seq.
ALOM program count: 0 value: 10.98 threshold: 0.0

PERIPHERAL Likelihood = 10.98 2

modified ALOM score: −2.70
----- Final Results -----

bacterial cytoplasm --- Certainty = 0.2666(Affirmative) <succ>
bacterial membrane --- Certainty = 0.0000(Not Clear) <succ>
bacterial outside --- Certainty = 0.0000(Not Clear) <succ>

### EXAMPLE 98

[0534] A DNA sequence was identified in S. agalactiae <SEQ ID 195> which encodes the amino acid sequence <SEQ ID 196>. Analysis of this protein sequence reveals the following:

| | |
|---|---|
| Lipop: | Possible site: −1 Crend: 9 |
| McG: | Discrim Score: −9.54 |
| GvH: | Signal Score (−7.5): −6.62 |
| | Possible site: 34 |

>>> Seems to have no N-terminal signal seq.
ALOM program count: 0 value: 11.51 threshold: 0.0

PERIPHERAL Likelihood = 11.51 22

modified ALOM score: −2.80
----- Final Results -----

bacterial cytoplasm --- Certainty = 0.2733(Affirmative) <succ>
bacterial membrane --- Certainty = 0.0000(Not Clear) <succ>
bacterial outside --- Certainty = 0.0000(Not Clear) <succ>

[0535] SEQ ID 196 is conserved.

### EXAMPLE 99

[0536] A DNA sequence was identified in S. agalactiae <SEQ ID 197> which encodes the amino acid sequence <SEQ ID 198>. Analysis of this protein sequence reveals the following:

| | |
|---|---|
| Lipop: | Possible site: −1 Crend: 5 |
| McG: | Discrim Score: −9.35 |
| GvH: | Signal Score (−7.5): −8.51 |
| | Possible site: 59 |

>>> Seems to have no N-terminal signal seq.
ALOM program count: 0 value: 8.86 threshold: 0.0

PERIPHERAL Likelihood = 8.86 58

modified ALOM score: −2.27
----- Final Results -----

bacterial cytoplasm --- Certainty = 0.3072(Affirmative) <succ>
bacterial membrane --- Certainty = 0.0000(Not Clear) <succ>
bacterial outside --- Certainty = 0.0000(Not Clear) <succ>

[0537] SEQ ID 198 is predicted to be conserved domain protein.

### EXAMPLE 100

[0538] A DNA sequence was identified in S. agalactiae <SEQ ID 199> which encodes the amino acid sequence <SEQ ID 200>. Analysis of this protein sequence reveals the following:

| | |
|---|---|
| Lipop: | Possible site: −1 Crend: 8 |
| McG: | Discrim Score: −9.31 |
| GvH: | Signal Score (−7.5): −5.47 |
| | Possible site: 36 |

>>> Seems to have no N-terminal signal seq.
ALOM program count: 0 value: 6.79 threshold: 0.0

PERIPHERAL Likelihood = 6.79 181

modified ALOM score: −1.86
----- Final Results -----

bacterial cytoplasm --- Certainty = 0.2456(Affirmative) <succ>
bacterial membrane --- Certainty = 0.0000(Not Clear) <succ>
bacterial outside --- Certainty = 0.0000(Not Clear) <succ>

[0539] SEQ ID 200 is conserved.

### EXAMPLE 101

[0540] A DNA sequence was identified in S. agalactiae <SEQ ID 201> which encodes the amino acid sequence <SEQ ID 202>. Analysis of this protein sequence reveals the following:

| | |
|---|---|
| Lipop: | Possible site: −1 Crend: 10 |
| McG: | Discrim Score: −28.48 |
| GvH: | Signal Score (−7.5): −8.72 |
| | Possible site: 45 |

>>> Seems to have no N-terminal signal seq.
ALOM program count: 0 value: 12.89 threshold: 0.0

PERIPHERAL Likelihood = 12.89 30

modified ALOM score: −3.08
----- Final Results -----

bacterial cytoplasm --- Certainty = 0.6941(Affirmative) <succ>
bacterial membrane --- Certainty = 0.0000(Not Clear) <succ>
bacterial outside --- Certainty = 0.0000(Not Clear) <succ>

### EXAMPLE 102

[0541] A DNA sequence was identified in S. agalactiae <SEQ ID 203> which encodes the amino acid sequence <SEQ ID 204>. Analysis of this protein sequence reveals the following:

| | |
|---|---|
| Lipop: | Possible site: −1 Crend: 7 |
| McG: | Discrim Score: −6.56 |
| GvH: | Signal Score (−7.5): −7.35 |
| | Possible site: 55 |

>>> Seems to have no N-terminal signal seq.
ALOM program count: 0 value: 2.97 threshold: 0.0

PERIPHERAL Likelihood = 2.97 133

modified ALOM score: −1.09
----- Final Results -----

bacterial cytoplasm --- Certainty = 0.2282(Affirmative) <succ>
bacterial membrane --- Certainty = 0.0000(Not Clear) <succ>
bacterial outside --- Certainty = 0.0000(Not Clear) <succ>

[0542] SEQ ID 204 is predicted to be ribosomal large subunit pseudouridine synthase, RluD subfamily.

### EXAMPLE 103

[0543] A DNA sequence was identified in S. agalactiae <SEQ ID 205> which encodes the amino acid sequence <SEQ ID 206>. Analysis of this protein sequence reveals the following:

| | |
|---|---|
| Lipop: | Possible site: −1 Crend: 0 |
| McG: | Discrim Score: −5.41 |
| GvH: | Signal Score (−7.5): −3.42 |
| | Possible site: 45 |

>>> Seems to have no N-terminal signal seq.
ALOM program count: 7 value: −10.77 threshold: 0.0

| | | | | | |
|---|---|---|---|---|---|
| INTEGRAL | Likelihood = | −10.77 | Transmembrane | 259-275 | (255-277) |
| INTEGRAL | Likelihood = | −6.90 | Transmembrane | 23-39 | (21-41) |
| INTEGRAL | Likelihood = | −6.79 | Transmembrane | 172-188 | (166-190) |
| INTEGRAL | Likelihood = | −6.37 | Transmembrane | 107-123 | (103-125) |
| INTEGRAL | Likelihood = | −5.57 | Transmembrane | 230-246 | (222-249) |
| INTEGRAL | Likelihood = | −3.40 | Transmembrane | 213-229 | (210-229) |
| INTEGRAL | Likelihood = | −0.96 | Transmembrane | 46-62 | (45-62) |
| PERIPHERAL | Likelihood = | 1.59 | 81 | | |

modified ALOM score: 2.65
----- Final Results -----

bacterial membrane --- Certainty = 0.5310(Affirmative) <succ>
bacterial outside --- Certainty = 0.0000(Not Clear) <succ>
bacterial cytoplasm --- Certainty = 0.0000(Not Clear) <succ>

[0544] SEQ ID 206 is predicted to be a transporter.

### EXAMPLE 104

[0545] A DNA sequence was identified in S. agalactiae <SEQ ID 207> which encodes the amino acid sequence <SEQ ID 208>. Analysis of this protein sequence reveals the following:

| | |
|---|---|
| Lipop: | Possible site: −1 Crend: 10 |
| McG: | Discrim Score: −4.99 |
| GvH: | Signal Score (−7.5): −3.84 |
| | Possible site: 52 |

>>> Seems to have no N-terminal signal seq.
ALOM Program count: 0 value: 2.54 threshold: 0.0

PERIPHERAL Likelihood = 2.54 352

modified ALOM score: −1.01
----- Final Results -----

bacterial cytoplasm --- Certainty = 0.1265(Affirmative) <succ>
bacterial membrane --- Certainty = 0.0000(Not Clear) <succ>
bacterial outside --- Certainty = 0.0000(Not Clear) <succ>

[0546] SEQ ID 208 is predicted to be inosine-5′-monophosphate dehydrogenase (guaB).

### EXAMPLE 105

[0547] A DNA sequence was identified in S. agalactiae <SEQ ID 209> which encodes the amino acid sequence <SEQ ID 210>. Analysis of this protein sequence reveals the following:

| | |
|---|---|
| Lipop: | Possible site: −1 Crend: 9 |
| McG: | Discrim Score: −8.58 |
| GvH: | Signal Score (−7.5): −5.78 |
| | Possible site: 13 |

>>> Seems to have no N-terminal signal seq.
ALOM program count: 0 value: 1.70 threshold: 0.0

PERIPHERAL Likelihood = 1.70 75

modified ALOM score: −0.84
----- Final Results -----

bacterial cytoplasm --- Certainty = 0.2372(Affirmative) <succ>
bacterial membrane --- Certainty = 0.0000(Not Clear) <succ>
bacterial outside --- Certainty = 0.0000(Not Clear) <succ>

[0548] SEQ ID 210 is predicted to be diacylglycerol kinase catalytic domain protein.

### EXAMPLE 106

[0549] A DNA sequence was identified in S. agalactiae <SEQ ID 211> which encodes the amino acid sequence <SEQ ID 212>. Analysis of this protein sequence reveals the following:

| | |
|---|---|
| Lipop: | Possible site: −1 Crend: 9 |
| McG: | Discrim Score: −6.62 |
| GvH: | Signal Score (−7.5): −6.28 |
| | Possible site: 43 |

>>> Seems to have no N-terminal signal seq.
ALOM program count: 0 value: 7.48 threshold: 0.0

PERIPHERAL Likelihood = 7.48 83

modified ALOM score: −2.00
----- Final Results -----

bacterial cytoplasm --- Certainty = 0.2079(Affirmative) <succ>
bacterial membrane --- Certainty = 0.0000(Not Clear) <succ>
bacterial outside --- Certainty = 0.0000(Not Clear) <succ>

[0550] SEQ ID 212 is conserved.

### EXAMPLE 107

[0551] A DNA sequence was identified in S. agalactiae <SEQ ID 213> which encodes the amino acid sequence <SEQ ID 214>. Analysis of this protein sequence reveals the following:

| | |
|---|---|
| Lipop: | Possible site: −1 Crend: 9 |
| McG: | Discrim Score: −7.71 |
| GvH: | Signal Score (−7.5): −4.11 |
| | Possible site: 46 |

>>> Seems to have no N-terminal signal seq.
ALOM program count: 0 value: 9.87 threshold: 0.0

PERIPHERAL Likelihood = 9.87 43

modified ALOM score: −2.47
----- Final Results -----

bacterial cytoplasm --- Certainty = 0.1865(Affirmative) <succ>
bacterial membrane --- Certainty = 0.0000(Not Clear) <succ>
bacterial outside --- Certainty = 0.0000(Not Clear) <succ>

### EXAMPLE 108

[0552] A DNA sequence was identified in S. agalactiae <SEQ ID 215> which encodes the amino acid sequence <SEQ ID 216>. Analysis of this protein sequence reveals the following:

| | |
|---|---|
| Lipop: | Possible site: −1 Crend: 4 |
| McG: | Discrim Score: 4.57 |
| GvH: | Signal Score (−7.5): −5.91 |
| | Possible site: 50 |

>>> Seems to have an uncleavable N-term signal seq
ALOM program count: 2 value: −11.68 threshold: 0.0

| | | | | | |
|---|---|---|---|---|---|
| INTEGRAL | Likelihood = | −11.68 | Transmembrane | 30-46 | (26-53) |
| INTEGRAL | Likelihood = | −0.80 | Transmembrane | 6-22 | (5-23) |
| PERIPHERAL | Likelihood = | 47.91 | 41 | | |

modified ALOM score: 2.84
----- Final Results -----

bacterial membrane --- Certainty = 0.5670(Affirmative) <succ>
bacterial outside --- Certainty = 0.0000(Not Clear) <succ>
bacterial cytoplasm --- Certainty = 0.0000(Not Clear) <succ>

[0553] SEQ ID 216 is conserved.

### EXAMPLE 109

[0554] A DNA sequence was identified in S. agalactiae <SEQ ID 217> which encodes the amino acid sequence <SEQ ID 218>. Analysis of this protein sequence reveals the following:

| | |
|---|---|
| Lipop: | Possible site: −1 Crend: 6 |
| McG: | Discrim Score: −12.87 |
| GvH: | Signal Score (−7.5): −3.7 |
| | Possible site: 40 |

>>> Seems to have no N-terminal signal seq.
ALOM program count: 1 value: −4.88 threshold: 0.0

| | | | | | |
|---|---|---|---|---|---|
| INTEGRAL | Likelihood = | −4.88 | Transmembrane | 44-60 | (41-61) |
| PERIPHERAL | Likelihood = | 10.03 | 2 | | |

modified ALOM score: 1.48
----- Final Results -----

bacterial membrane --- Certainty = 0.2954(Affirmative) <succ>
bacterial outside --- Certainty = 0.0000(Not Clear) <succ>
bacterial cytoplasm --- Certainty = 0.0000(Not Clear) <succ>

[0555] SEQ ID 218 is predicted to be Tn916.

### EXAMPLE 110

[0556] A DNA sequence was identified in S. agalactiae <SEQ ID 219> which encodes the amino acid sequence <SEQ ID 220>. Analysis of this protein sequence reveals the following:

| | |
|---|---|
| Lipop: | Possible site: −1 Crend: 7 |
| McG: | Discrim Score: −3.24 |
| GvH: | Signal Score (−7.5): −12.59 |
| | Possible site: 16 |

>>> Seems to have no N-terminal signal seq.
ALOM program count: 0 value: 8.06 threshold: 0.0

PERIPHERAL Likelihood = 8.06 4

modified ALOM score: −2.11
----- Final Results -----

bacterial cytoplasm --- Certainty = 0.2666(Affirmative) <succ>
bacterial membrane --- Certainty = 0.0000(Not Clear) <succ>
bacterial outside --- Certainty = 0.0000(Not Clear) <succ>

[0557] SEQ ID 220 is predicted to be Tn916.

### EXAMPLE 111

[0558] A DNA sequence was identified in S. agalactiae <SEQ ID 221> which encodes the amino acid sequence <SEQ ID 222>. Analysis of this protein sequence reveals the following:

| | |
|---|---|
| Lipop: | Possible site: −1 Crend: 3 |
| McG: | Discrim Score: −2.03 |
| GvH: | Signal Score (−7.5): −9.79 |
| | Possible site: 52 |

>>> Seems to have no N-terminal signal seq.
ALOM program count: 0 value: 11.35 threshold: 0.0

PERIPHERAL Likelihood = 11.35 40

modified ALOM score: −2.77
----- Final Results -----

bacterial cytoplasm --- Certainty = 0.1864(Affirmative) <succ>
bacterial membrane --- Certainty = 0.0000(Not Clear) <succ>
bacterial outside --- Certainty = 0.0000(Not Clear) <succ>

[0559] SEQ ID 222 is predicted to be Tn916.

### EXAMPLE 112

[0560] A DNA sequence was identified in S. agalactiae <SEQ ID 223> which encodes the amino acid sequence <SEQ ID 224>. Analysis of this protein sequence reveals the following:

| | |
|---|---|
| Lipop: | Possible site: −1 Crend: 9 |
| McG: | Discrim Score: −7.39 |
| GvH: | Signal Score (−7.5): −8.64 |
| | Possible site: 18 |

>>> Seems to have no N-terminal signal seq.
ALOM program count: 0 value: 14.69 threshold: 0.0

PERIPHERAL Likelihood = 14.69 2

modified ALOM score: −3.44
----- Final Results -----

bacterial cytoplasm --- Certainty = 0.2706(Affirmative) <succ>
bacterial membrane --- Certainty = 0.0000(Not Clear) <succ>
bacterial outside --- Certainty = 0.0000(Not Clear) <succ>

[0561] SEQ ID 224 is predicted to be Tn916, tetM leader peptide.

### EXAMPLE 113

[0562] A DNA sequence was identified in S. agalactiae <SEQ ID 225> which encodes the amino acid sequence <SEQ ID 226>. Analysis of this protein sequence reveals the following:

| | |
|---|---|
| Lipop: | Possible site: −1 Crend: 7 |
| McG: | Discrim Score: −18.13 |
| GvH: | Signal Score (−7.5): −9.17 |
| | Possible site: 20 |

>>> Seems to have no N-terminal signal seq.
ALOM program count: 0 value: 15.44 threshold: 0.0

PERIPHERAL Likelihood = 15.44 3

modified ALOM score: −3.59
----- Final Results -----

bacterial cytoplasm --- Certainty = 0.4960(Affirmative) <succ>
bacterial membrane --- Certainty = 0.0000(Not Clear) <succ>
bacterial outside --- Certainty = 0.0000(Not Clear) <succ>

[0563] SEQ ID 226 is predicted to be ribosomal protein L33.

### EXAMPLE 114

[0564] A DNA sequence was identified in S. agalactiae <SEQ ID 227> which encodes the amino acid sequence <SEQ ID 228>. Analysis of this protein sequence reveals the following:

| | |
|---|---|
| Lipop: | Possible site: −1 Crend: 9 |
| McG: | Discrim Score: −17.04 |
| GvH: | Signal Score (−7.5): −8.31 |
| | Possible site: 22 |

>>> Seems to have no N-terminal signal seq.
ALOM program count: 1 value: −2.23 threshold: 0.0

| | | | | | |
|---|---|---|---|---|---|
| INTEGRAL | Likelihood = | −2.23 | Transmembrane | 102-118 | (101-118) |
| PERIPHERAL | Likelihood = | 9.18 | 43 | | |

modified ALOM score: 0.95
----- Final Results -----

bacterial membrane --- Certainty = 0.1893(Affirmative) <succ>
bacterial outside --- Certainty = 0.0000(Not Clear) <succ>
bacterial cytoplasm --- Certainty = 0.0000(Not Clear) <succ>

[0565] SEQ ID 228 is predicted to be HNH endonuclease family protein.

### EXAMPLE 115

[0566] A DNA sequence was identified in S. agalactiae <SEQ ID 229> which encodes the amino acid sequence <SEQ ID 230>. Analysis of this protein sequence reveals the following:

| | |
|---|---|
| Lipop: | Possible site: −1 Crend: 4 |
| McG: | Discrim Score: −8.57 |
| GvH: | Signal Score (−7.5): −6.8 |
| | Possible site: 21 |

>>> Seems to have no N-terminal signal seq.
ALOM program count: 0 value: 11.94 threshold: 0.0

PERIPHERAL Likelihood = 11.94 6

modified ALOM score: −2.89
----- Final Results -----

bacterial cytoplasm --- Certainty = 0.2574(Affirmative) <succ>
bacterial membrane --- Certainty = 0.0000(Not Clear) <succ>
bacterial outside --- Certainty = 0.0000(Not Clear) <succ>

[0567] SEQ ID 230 is predicted to be ribosomal protein L33.

### EXAMPLE 116

[0568] A DNA sequence was identified in S. agalactiae <SEQ ID 231> which encodes the amino acid sequence <SEQ ID 232>. Analysis of this protein sequence reveals the following:

| | |
|---|---|
| Lipop: | Possible site: −1 Crend: 0 |
| McG: | Discrim Score: −1.05 |
| GvH: | Signal Score (−7.5): 4.41 |
| | Possible site: 13 |

>>> Seems to have no N-terminal signal seq.
ALOM program count: 0 value: 4.51 threshold: 0.0

PERIPHERAL Likelihood = 4.51 3

modified ALOM score: −1.40
----- Final Results -----

bacterial membrane --- Certainty = 0.0000(Not Clear) <succ>
bacterial outside --- Certainty = 0.0000(Not Clear) <succ>
bacterial cytoplasm --- Certainty = 0.0000(Not Clear) <succ>

[0569] SEQ ID 232 is predicted to be conjugal transfer protein, interruption-N.

### EXAMPLE 117

[0570] A DNA sequence was identified in S. agalactiae <SEQ ID 233> which encodes the amino acid sequence <SEQ ID 234>. Analysis of this protein sequence reveals the following:

| | |
|---|---|
| GvH: | Signal Score (−7.5): 4.41 |
| | Possible site: 13 |

>>> Seems to have no N-terminal signal seq.
ALOM program count: 0 value: 4.51 threshold: 0.0

PERIPHERAL Likelihood = 4.51 3

modified ALOM score: −1.40
----- Final Results -----

bacterial membrane --- Certainty = 0.0000(Not Clear) <succ>
bacterial outside --- Certainty = 0.0000(Not Clear) <succ>
bacterial cytoplasm --- Certainty = 0.0000(Not Clear) <succ>

[0571] SEQ ID 234 is predicted to be peptidase, M23/M37 family.

### EXAMPLE 118

[0572] A DNA sequence was identified in S. pyogenes <SEQ ID 235> which encodes the amino acid sequence <SEQ ID 236>. This coding sequence was not identified by Ferretti et al.

### EXAMPLE 119

[0573] A DNA sequence was identified in S. pyogenes <SEQ ID 237> which encodes the amino acid sequence <SEQ ID 238>. This coding sequence was not identified by Ferretti et al.

### EXAMPLE 120

[0574] A DNA sequence was identified in S. pyogenes <SEQ ID 239> which encodes the amino acid sequence <SEQ ID 240>. This coding sequence was not identified by Ferretti et al.

### EXAMPLE 121

[0575] A DNA sequence was identified in S. pyogenes <SEQ ID 241> which encodes the amino acid sequence <SEQ ID 242>. This coding sequence was not identified by Ferretti et al.

### EXAMPLE 122

[0576] A DNA sequence was identified in S. pyogenes <SEQ ID 243> which encodes the amino acid sequence <SEQ ID 244>. This coding sequence was not identified by Ferretti et al.

### EXAMPLE 123

[0577] A DNA sequence was identified in S. pyogenes <SEQ ID 245> which encodes the amino acid sequence <SEQ ID 246>. This coding sequence was not identified by Ferretti et al.

### EXAMPLE 124

[0578] A DNA sequence was identified in S. pyogenes <SEQ ID 247> which encodes the amino acid sequence <SEQ ID 248>. This coding sequence was not identified by Ferretti et al. It may be a transposase.

### EXAMPLE 125

[0579] A DNA sequence was identified in S. pyogenes <SEQ ID 249> which encodes the amino acid sequence <SEQ ID 250>. This coding sequence was not identified by Ferretti et al. It may be a transposase.

### EXAMPLE 126

[0580] A DNA sequence was identified in S. pyogenes <SEQ ID 251> which encodes the amino acid sequence <SEQ ID 252>. This coding sequence was not identified by Ferretti et al.

### EXAMPLE 127

[0581] A DNA sequence was identified in S. pyogenes <SEQ ID 253> which encodes the amino acid sequence <SEQ ID 254>. This coding sequence was not identified by Ferretti et al.

### EXAMPLE 128

[0582] A DNA sequence was identified in S. pyogenes <SEQ ID 255> which encodes the amino acid sequence <SEQ ID 256>. This coding sequence was not identified by Ferretti el al.

### EXAMPLE 129

[0583] A DNA sequence was identified in S. pyogenes <SEQ ID 257> which encodes the amino acid sequence <SEQ ID 258>. This coding sequence was not identified by Ferretti et al.

### EXAMPLE 130

[0584] A DNA sequence was identified in S. pyogenes <SEQ ID 259> which encodes the amino acid sequence <SEQ ID 260>. This coding sequence was not identified by Ferretti et al.

### EXAMPLE 131

[0585] A DNA sequence was identified in S. pyogenes <SEQ ID 261> which encodes the amino acid sequence <SEQ ID 262>. This coding sequence was not identified by Ferretti et al.

### EXAMPLE 132

[0586] A DNA sequence was identified in S. pyogenes <SEQ ID 263> which encodes the amino acid sequence <SEQ ID 264>. This coding sequence was not identified by Ferretti et al.

### EXAMPLE 133

[0587] A DNA sequence was identified in S. pyogenes <SEQ ID 265> which encodes the amino acid sequence <SEQ ID 266>. This coding sequence was not identified by Ferretti et al.

### EXAMPLE 134

[0588] A DNA sequence was identified in S. pyogenes <SEQ ID 267> which encodes the amino acid sequence <SEQ ID 268>. This coding sequence was not identified by Ferretti et al. It may be an ABC transporter.

### EXAMPLE 135

[0589] A DNA sequence was identified in S. pyogenes <SEQ ID 269> which encodes the amino acid sequence <SEQ ID 270>. This coding sequence was not identified by Ferretti et al. It may be an integrase.

### EXAMPLE 136

[0590] A DNA sequence was identified in S. pyogenes <SEQ ID 271> which encodes the amino acid sequence <SEQ ID 272>. This coding sequence was not identified by Ferretti et al.

### EXAMPLE 137

[0591] A DNA sequence was identified in S. pyogenes <SEQ ID 273> which encodes the amino acid sequence <SEQ ID 274>. This coding sequence was not identified by Ferretti et al.

### EXAMPLE 138

[0592] A DNA sequence was identified in S. pyogenes <SEQ ID 275> which encodes the amino acid sequence <SEQ ID 276>. This coding sequence was not identified by Ferretti et al.

### EXAMPLE 139

[0593] A DNA sequence was identified in S. pyogenes <SEQ ID 277> which encodes the amino acid sequence <SEQ ID 278>. This coding sequence was not identified by Ferretti et al.

### EXAMPLE 140

[0594] A DNA sequence was identified in S. pyogenes <SEQ ID 279> which encodes the amino acid sequence <SEQ ID 280>. This coding sequence was not identified by Ferretti et al.

### EXAMPLE 141

[0595] A DNA sequence was identified in S. pyogenes <SEQ ID 281> which encodes the amino acid sequence <SEQ ID 282>. This coding sequence was not identified by Ferretti et al.

### EXAMPLE 142

[0596] A DNA sequence was identified in S. pyogenes <SEQ ID 283> which encodes the amino acid sequence <SEQ ID 284>. This coding sequence was not identified by Ferretti et al.

### EXAMPLE 143

[0597] A DNA sequence was identified in S. pyogenes <SEQ ID 285> which encodes the amino acid sequence <SEQ ID 286>. This coding sequence was not identified by Ferretti et al.

### EXAMPLE 144

[0598] A DNA sequence was identified in S. pyogenes <SEQ ID 287> which encodes the amino acid sequence <SEQ ID 288>. This coding sequence was not identified by Ferretti et al.

### EXAMPLE 145

[0599] A DNA sequence was identified in S. pyogenes <SEQ ID 289> which encodes the amino acid sequence <SEQ ID 290>. This coding sequence was not identified by Ferretti et al.

### EXAMPLE 146

[0600] A DNA sequence was identified in S. pyogenes <SEQ ID 291> which encodes the amino acid sequence <SEQ ID 292>. This coding sequence was not identified by Ferretti et al.

### EXAMPLE 147

[0601] A DNA sequence was identified in S. pyogenes <SEQ ID 293> which encodes the amino acid sequence <SEQ ID 294>. This coding sequence was not identified by Ferretti et al.

### EXAMPLE 148

[0602] A DNA sequence was identified in S. pyogenes <SEQ ID 295> which encodes the amino acid sequence <SEQ ID 296>. This coding sequence was not identified by Ferretti et al.

### EXAMPLE 149

[0603] A DNA sequence was identified in S. pyogenes <SEQ ID 297> which encodes the amino acid sequence <SEQ ID 298>. This coding sequence was not identified by Ferretti et al.

### EXAMPLE 150

[0604] A DNA sequence was identified in S. pyogenes <SEQ ID 299> which encodes the amino acid sequence <SEQ ID 300>. This coding sequence was not identified by Ferretti et al. It may be a regulatory protein.

### EXAMPLE 151

[0605] A DNA sequence was identified in S. pyogenes <SEQ ID 301> which encodes the amino acid sequence <SEQ ID 302>. This coding sequence is frameshifted relative to GI:13621570.

### EXAMPLE 152

[0606] A DNA sequence was identified in S. pyogenes <SEQ ID 303> which encodes the amino acid sequence <SEQ ID 304>. This coding sequence is frameshifted relative to GI:13621491.

### EXAMPLE 153

[0607] A DNA sequence was identified in S. pyogenes <SEQ ID 305> which encodes the amino acid sequence <SEQ ID 306>. This coding sequence was not identified by Ferretti et al. It may be a metal-dependent transcription regulator.

### EXAMPLE 154

[0608] A DNA sequence was identified in S. pyogenes <SEQ ID 307> which encodes the amino acid sequence <SEQ ID 308>. This coding sequence was not identified by Ferretti el al.

### EXAMPLE 155

[0609] A DNA sequence was identified in S. pyogenes <SEQ ID 309> which encodes the amino acid sequence <SEQ ID 310>. This coding sequence was not identified by Ferretti el al.

### EXAMPLE 156

[0610] A DNA sequence was identified in S. pyogenes <SEQ ID 311> which encodes the amino acid sequence <SEQ ID 312>. This coding sequence was not identified by Ferretti et al. It may be a maltose/maltodextrin binding protein.

### EXAMPLE 157

[0611] A DNA sequence was identified in S. pyogenes <SEQ ID 313> which encodes the amino acid sequence <SEQ ID 314>. This coding sequence was not identified by Ferretti et al. It may be a beta-glucosidaase.

### EXAMPLE 158

[0612] A DNA sequence was identified in S. pyogenes <SEQ ID 315> which encodes the amino acid sequence <SEQ ID 316>. This coding sequence was not identified by Ferretti et al.

### EXAMPLE 159

[0613] A DNA sequence was identified in S. pyogenes <SEQ ID 317> which encodes the amino acid sequence <SEQ ID 318>. This coding sequence was not identified by Ferretti et al. It may be a sugar-binding transport protein

### EXAMPLE 160

[0614] A DNA sequence was identified in S. pyogenes <SEQ ID 319> which encodes the amino acid sequence <SEQ ID 320>. This coding sequence was not identified by Ferretti el al. It may be a transcription regulator.

### EXAMPLE 161

[0615] A DNA sequence was identified in S. pyogenes <SEQ ID 321> which encodes the amino acid sequence <SEQ ID 322>. This coding sequence was not identified by Ferretti et al. It may be an ABC transporter.

### EXAMPLE 162

[0616] A DNA sequence was identified in S. pyogenes <SEQ ID 323> which encodes the amino acid sequence <SEQ ID 324>. This coding sequence was not identified by Ferretti et al. It may be a phospho-beta-D-galactosidase.

### EXAMPLE 163

[0617] A DNA sequence was identified in S. pyogenes <SEQ ID 325> which encodes the amino acid sequence <SEQ ID 326>. This coding sequence was not identified by Ferretti et al. It may be a mitogenic factor.

### EXAMPLE 164

[0618] A DNA sequence was identified in S. pyogenes <SEQ ID 327> which encodes the amino acid sequence <SEQ ID 328>. This coding sequence was not identified by Ferretti et al.

### EXAMPLE 165

[0619] A DNA sequence was identified in S. pyogenes <SEQ ID 329> which encodes the amino acid sequence <SEQ ID 330>. This coding sequence was not identified by Ferretti et al. It may be a transposase.

### EXAMPLE 166

[0620] A DNA sequence was identified in S. pyogenes <SEQ ID 331> which encodes the amino acid sequence <SEQ ID 332>. This coding sequence was not identified by Ferretti et al.

### EXAMPLE 167

[0621] A DNA sequence was identified in S. pyogenes <SEQ ID 333> which encodes the amino acid sequence <SEQ ID 334>. This coding sequence was not identified by Ferretti et al. It may be a positive regulator.

### EXAMPLE 168

[0622] A DNA sequence was identified in S. pyogenes <SEQ ID 335> which encodes the amino acid sequence <SEQ ID 336>. This coding sequence was not identified by Ferretti et al. It may be a member of the DEAD box helicase family and may be phage-related.

### EXAMPLE 169

[0623] A DNA sequence was identified in S. pyogenes <SEQ ID 337> which encodes the amino acid sequence <SEQ ID 338>. This coding sequence was not identified by Ferretti et al. and may be phage-related.

### EXAMPLE 170

[0624] A DNA sequence was identified in S. pyogenes <SEQ ID 339> which encodes the amino acid sequence <SEQ ID 340>. This coding sequence was not identified by Ferretti et al. It may be a transcriptional regulator in the GntR family.

### EXAMPLE 171

[0625] A DNA sequence was identified in S. pyogenes <SEQ ID 341> which encodes the amino acid sequence <SEQ ID 342>. This coding sequence was not identified by Ferretti et al. It may be a folyl-polyglutamate synthetase.

### EXAMPLE 172

[0626] A DNA sequence was identified in S. pyogenes <SEQ ID 343> which encodes the amino acid sequence <SEQ ID 344>. This coding sequence was not identified by Ferretti et al.

### EXAMPLE 173

[0627] A DNA sequence was identified in S. pyogenes <SEQ ID 345> which encodes the amino acid sequence <SEQ ID 346>. This coding sequence was not identified by Ferretti et al.

### EXAMPLE 174

[0628] A DNA sequence was identified in S. pyogenes <SEQ ID 347> which encodes the amino acid sequence <SEQ ID 348>. This coding sequence was identified by Ferretti et al. as a putative transcription factor in the Lac1 family, but its antigenicity was not.

### EXAMPLE 175

[0629] A DNA sequence was identified in S. pyogenes <SEQ ID 349> which encodes the amino acid sequence <SEQ ID 350>. This coding sequence was identified by Ferretti et al. as a phage-associated protein, but its antigenicity was not.

### EXAMPLE 176

[0630] A DNA sequence was identified in S. pyogenes <SEQ ID 351> which encodes the amino acid sequence <SEQ ID 352>. This coding sequence was identified by Ferretti et al. as a phage-associated protein, but its antigenicity was not.

### EXAMPLE 177

[0631] A DNA sequence was identified in S. pyogenes <SEQ ID 353>. The sequence encodes the amino acid sequence <SEQ ID 354>. The encoded polypeptide may be phage-associated.

### EXAMPLE 178

[0632] A DNA sequence was identified in S. pyogenes <SEQ ID 355>. The sequence encodes the amino acid sequence <SEQ ID 356>. The encoded polypeptide is a transcriptional regulator (GntR family).

### EXAMPLE 179

[0633] A DNA sequence was identified in S. pyogenes <SEQ ID 357>. The sequence encodes the amino acid sequence <SEQ ID 358>.

### EXAMPLE 180

[0634] A DNA sequence was identified in S. pyogenes <SEQ ID 359>. The sequence encodes the amino acid sequence <SEQ ID 360>. The encoded polypeptide is a histidine triad (HIT) protein.

### EXAMPLE 181

[0635] A DNA sequence was identified in S. pyogenes <SEQ ID 361>. The sequence encodes the amino acid sequence <SEQ ID 362>. The encoded polypeptide is a transcription regulator.

### EXAMPLE 182

[0636] A DNA sequence was identified in S. pyogenes <SEQ ID 363>. The sequence encodes the amino acid sequence <SEQ ID 364>. The encoded polypeptide is a response regulator of salavaricin regulon.

### EXAMPLE 183

[0637] A DNA sequence was identified in S. pyogenes <SEQ ID 365>. The sequence encodes the amino acid sequence <SEQ ID 366>.

### EXAMPLE 184

[0638] A DNA sequence was identified in S. pyogenes <SEQ ID 367>. The sequence encodes the amino acid sequence <SEQ ID 368>. The encoded polypeptide is a shikimate 5-dehydrogenase.

### EXAMPLE 185

[0639] A DNA sequence was identified in S. pyogenes <SEQ ID 369>. The sequence encodes the amino acid sequence <SEQ ID 370>.

### EXAMPLE 186

[0640] A DNA sequence was identified in S. pyogenes <SEQ ID 371>. The sequence encodes the amino acid sequence <SEQ ID 372>. The encoded polypeptide is a cI-like repressor, phage associated.

### EXAMPLE 187

[0641] A DNA sequence was identified in S. pyogenes <SEQ ID 373>. The sequence encodes the amino acid sequence <SEQ ID 374>. The encoded polypeptide is an acetyl-CoA:acetyltransferase.

### EXAMPLE 188

[0642] A DNA sequence was identified in S. pyogenes <SEQ ID 375>. The sequence encodes the amino acid sequence <SEQ ID 376>. The encoded polypeptide is a methylmalonyl-CoA decarboxylase, gamma-subunit.

### EXAMPLE 189

[0643] A DNA sequence was identified in S. pyogenes <SEQ ID 377>. The sequence encodes the amino acid sequence <SEQ ID 378>. The encoded polypeptide is an acetyl-CoA acetyltransferase.

### EXAMPLE 190

[0644] A DNA sequence was identified in S. pyogenes <SEQ ID 379>. The sequence encodes the amino acid sequence <SEQ ID 380>. The encoded polypeptide is a decarboxylase, gamma chain.

### EXAMPLE 191

[0645] A DNA sequence was identified in S. pyogenes <SEQ ID 381>. The sequence encodes the amino acid sequence <SEQ ID 382>. The encoded polypeptide is an ABC transporter (ATP binding)—lantibiotic associated.

### EXAMPLE 192

[0646] A DNA sequence was identified in S. pyogenes <SEQ ID 383>. The sequence encodes the amino acid sequence <SEQ ID 384>. The encoded polypeptide is a transaldolase.

### EXAMPLE 193

[0647] A DNA sequence was identified in S. pyogenes <SEQ ID 385>. The sequence encodes the amino acid sequence <SEQ ID 386>.

### EXAMPLE 194

[0648] A DNA sequence was identified in S. pyogenes <SEQ ID 387>. The sequence encodes the amino acid sequence <SEQ ID 388>. The encoded polypeptide may be phage-associated.

### EXAMPLE 195

[0649] A DNA sequence was identified in S. pyogenes <SEQ ID 389>. The sequence encodes the amino acid sequence <SEQ ID 390>. The encoded polypeptide is an esterase.

### EXAMPLE 196

[0650] A DNA sequence was identified in S. pyogenes <SEQ ID 391>. The sequence encodes the amino acid sequence <SEQ ID 392>. The encoded polypeptide is a DNA binding regulatory protein—lantibiotic associated.

### EXAMPLE 197

[0651] A DNA sequence was identified in S. pyogenes <SEQ ID 393>. The sequence encodes the amino acid sequence <SEQ ID 394>. The encoded polypeptide is a Xaa-His dipeptidase.

### EXAMPLE 198

[0652] A DNA sequence was identified in S. pyogenes <SEQ ID 395>. The sequence encodes the amino acid sequence <SEQ ID 396>.

### EXAMPLE 199

[0653] A DNA sequence was identified in S. pyogenes <SEQ ID 397>. The sequence encodes the amino acid sequence <SEQ ID 398>. The encoded polypeptide is a PTS enzyme III.

### EXAMPLE 200

[0654] A DNA sequence was identified in S. pyogenes <SEQ ID 399>. The sequence encodes the amino acid sequence <SEQ ID 400>. The encoded polypeptide is a salivaricin an ABC transporter (ATP-binding protein).

### EXAMPLE 201

[0655] A DNA sequence was identified in S. pyogenes <SEQ ID 401>. The sequence encodes the amino acid sequence <SEQ ID 402>. The encoded polypeptide is a PTS system, lactose-specific component IIA.

### EXAMPLE 202

[0656] A DNA sequence was identified in S. pyogenes <SEQ ID 403>. The sequence encodes the amino acid sequence <SEQ ID 404>. The encoded polypeptide is a Cro-like repressor protein-phage associated.

### EXAMPLE 203

[0657] A DNA sequence was identified in S. pyogenes <SEQ ID 405>. The sequence encodes the amino acid sequence <SEQ ID 406>. The encoded polypeptide is a beta-glucosidase.

### EXAMPLE 204

[0658] A DNA sequence was identified in S. pyogenes <SEQ ID 407>. The sequence encodes the amino acid sequence <SEQ ID 408>. The encoded polypeptide is a M protein trans-acting positive regulator.

### EXAMPLE 205

[0659] A DNA sequence was identified in S. pyogenes <SEQ ID 409>. The sequence encodes the amino acid sequence <SEQ ID 410>. The encoded polypeptide is a streptolysin S associated protein.

### EXAMPLE 206

[0660] A DNA sequence was identified in S. pyogenes <SEQ ID 411>. The sequence encodes the amino acid sequence <SEQ ID 412>. The encoded polypeptide is an integrase—phage associated.

### EXAMPLE 207

[0661] A DNA sequence was identified in S. pyogenes <SEQ ID 413>. The sequence encodes the amino acid sequence <SEQ ID 414>.

### EXAMPLE 208

[0662] A DNA sequence was identified in S. pyogenes <SEQ ID 415>. The sequence encodes the amino acid sequence <SEQ ID 416>.

### EXAMPLE 209

[0663] A DNA sequence was identified in S. pyogenes <SEQ ID 417>. The sequence encodes the amino acid sequence <SEQ ID 418>. The encoded polypeptide is a metal-dependent transcriptional regulator.

### EXAMPLE 210

[0664] A DNA sequence was identified in S. pyogenes <SEQ ID 419>. The sequence encodes the amino acid sequence <SEQ ID 420>.

### EXAMPLE 211

[0665] A DNA sequence was identified in S. pyogenes <SEQ ID 421>. The sequence encodes the amino acid sequence <SEQ ID 422>. The encoded polypeptide is a galactosidase acetyltransferase.

### EXAMPLE 212

[0666] A DNA sequence was identified in S. pyogenes <SEQ ID 423>. The sequence encodes the amino acid sequence <SEQ ID 424>. The encoded polypeptide is a repressor protein—phage associated.

### EXAMPLE 213

[0667] A DNA sequence was identified in S. pyogenes <SEQ ID 425>. The sequence encodes the amino acid sequence <SEQ ID 426>. The encoded polypeptide is an arginine repressor.

### EXAMPLE 214

[0668] A DNA sequence was identified in S. pyogenes <SEQ ID 427>. The sequence encodes the amino acid sequence <SEQ ID 428>.

### EXAMPLE 215

[0669] A DNA sequence was identified in S. pyogenes <SEQ ID 429>. The sequence encodes the amino acid sequence <SEQ ID 430>.

### EXAMPLE 216

[0670] A DNA sequence was identified in S. pyogenes <SEQ ID 431>. The sequence encodes the amino acid sequence <SEQ ID 432>.

### EXAMPLE 217

[0671] A DNA sequence was identified in S. pyogenes <SEQ ID 433>. The sequence encodes the amino acid sequence <SEQ ID 434>. The encoded polypeptide may be phage-associated.

### EXAMPLE 218

[0672] A DNA sequence was identified in S. pyogenes <SEQ ID 435>. The sequence encodes the amino acid sequence <SEQ ID 436>, which is related to SEQ ID 9430 of WO02/34771. The encoded polypeptide is a 30S ribosomal protein S12.

### EXAMPLE 219

[0673] A DNA sequence was identified in S. pyogenes <SEQ ID 437>. The sequence encodes the amino acid sequence <SEQ ID 438>, which is related to SEQ ID 32 of WO02/34771. The encoded polypeptide is a transposase—IS861 associated.

### EXAMPLE 220

[0674] A DNA sequence was identified in S. pyogenes <SEQ ID 439>. The sequence encodes the amino acid sequence <SEQ ID 440>, which is related to SEQ ID 5756 of WO02/34771. The encoded polypeptide is a 50S ribosomal protein L34.

### EXAMPLE 221

[0675] A DNA sequence was identified in S. pyogenes <SEQ ID 441>. The sequence encodes the amino acid sequence <SEQ ID 442>, which is related to SEQ ID 7334 of WO02/34771.

### EXAMPLE 222

[0676] A DNA sequence was identified in S. pyogenes <SEQ ID 443>. The sequence encodes the amino acid sequence <SEQ ID 444>, which is related to SEQ ID 732 of WO02/34771.

### EXAMPLE 223

[0677] A DNA sequence was identified in S. pyogenes <SEQ ID 445>. The sequence encodes the amino acid sequence <SEQ ID 446>, which is related to SEQ ID 6354 of WO02/34771. The encoded polypeptide is a 30S ribosomal protein S14.

### EXAMPLE 224

[0678] A DNA sequence was identified in S. pyogenes <SEQ ID 447>. The sequence encodes the amino acid sequence <SEQ ID 448>, which is related to SEQ ID 7252 of WO02/34771.

### EXAMPLE 225

[0679] A DNA sequence was identified in S. pyogenes <SEQ ID 449>. The sequence encodes the amino acid sequence <SEQ ID 450>, which is related to SEQ ID 7776 of WO02/34771.

### EXAMPLE 226

[0680] A DNA sequence was identified in S. pyogenes <SEQ ID 451>. The sequence encodes the amino acid sequence <SEQ ID 452>, which is related to SEQ ID 8214 of WO02/34771.

### EXAMPLE 227

[0681] A DNA sequence was identified in S. pyogenes <SEQ ID 453>. The sequence encodes the amino acid sequence <SEQ ID 454>, which is related to SEQ ID 4696 of WO02/34771. The encoded polypeptide is a 30S ribosomal protein S20.

### EXAMPLE 228

[0682] A DNA sequence was identified in S. pyogenes <SEQ ID 455>. The sequence encodes the amino acid sequence <SEQ ID 456>, which is related to SEQ ID 7594 of WO02/34771.

### EXAMPLE 229

[0683] A DNA sequence was identified in S. pyogenes <SEQ ID 457>. The sequence encodes the amino acid sequence <SEQ ID 458>, which is related to SEQ ID 8022 of WO02/34771.

### EXAMPLE 230

[0684] A DNA sequence was identified in S. pyogenes <SEQ ID 459>. The sequence encodes the amino acid sequence <SEQ ID 460>, which is related to SEQ ID 7700 of WO02/34771.

### EXAMPLE 231

[0685] A DNA sequence was identified in S. pyogenes <SEQ ID 461>. The sequence encodes the amino acid sequence <SEQ ID 462>, which is related to SEQ ID 8056 of WO02/34771. The encoded polypeptide may be phage-associated.

### EXAMPLE 232

[0686] A DNA sequence was identified in S. pyogenes <SEQ ID 463>. The sequence encodes the amino acid sequence <SEQ ID 464>, which is related to SEQ ID 4438 of WO02/34771.

### EXAMPLE 233

[0687] A DNA sequence was identified in S. pyogenes <SEQ ID 465>. The sequence encodes the amino acid sequence <SEQ ID 466>, which is related to SEQ ID 1124 of WO02/34771.

### EXAMPLE 234

[0688] A DNA sequence was identified in S. pyogenes <SEQ ID 467>. The sequence encodes the amino acid sequence <SEQ ID 468>, which is related to SEQ ID 7840 of WO02/34771.

### EXAMPLE 235

[0689] A DNA sequence was identified in S. pyogenes <SEQ ID 469>. The sequence encodes the amino acid sequence <SEQ ID 470>, which is related to SEQ ID 8164 of WO02/34771.

### EXAMPLE 236

[0690] A DNA sequence was identified in S. pyogenes <SEQ ID 471>. The sequence encodes the amino acid sequence <SEQ ID 472>, which is related to SEQ ID 2374 of WO02/34771.

### EXAMPLE 237

[0691] A DNA sequence was identified in S. pyogenes <SEQ ID 473>. The sequence encodes the amino acid sequence <SEQ ID 474>, which is related to SEQ ID 7266 of WO02/34771.

### EXAMPLE 238

[0692] A DNA sequence was identified in S. pyogenes <SEQ ID 475>. The sequence encodes the amino acid sequence <SEQ ID 476>, which is related to SEQ ID 7338 of WO02/34771. The encoded polypeptide is a regulatory protein.

### EXAMPLE 239

[0693] A DNA sequence was identified in S. pyogenes <SEQ ID 477>. The sequence encodes the amino acid sequence <SEQ ID 478>, which is related to SEQ ID 3486 of WO02/34771. The encoded polypeptide is a ribosomal protein.

### EXAMPLE 240

[0694] A DNA sequence was identified in S. pyogenes <SEQ ID 479>. The sequence encodes the amino acid sequence <SEQ ID 480>, which is related to SEQ ID 2692 of WO02/34771.

### EXAMPLE 241

[0695] A DNA sequence was identified in S. pyogenes <SEQ ID 481>. The sequence encodes the amino acid sequence <SEQ ID 482>, which is related to SEQ ID 2180 of WO02/34771.

### EXAMPLE 242

[0696] A DNA sequence was identified in S. pyogenes <SEQ ID 483>. The sequence encodes the amino acid sequence <SEQ ID 484>, which is related to SEQ ID 7560 of WO02/34771.

### EXAMPLE 243

[0697] A DNA sequence was identified in S. pyogenes <SEQ ID 485>. The sequence encodes the amino acid sequence <SEQ ID 486>, which is related to SEQ ID 1428 of WO02/34771. The encoded polypeptide may be phage associated.

### EXAMPLE 244

[0698] A DNA sequence was identified in S. pyogenes <SEQ ID 487>. The sequence encodes the amino acid sequence <SEQ ID 488>, which is related to SEQ ID 604 of WO02/34771.

### EXAMPLE 245

[0699] A DNA sequence was identified in S. pyogenes <SEQ ID 489>. The sequence encodes the amino acid sequence <SEQ ID 490>, which is related to SEQ ID 6342 of WO02/34771. The encoded polypeptide is a 50S ribosomal protein L18.

### EXAMPLE 246

[0700] A DNA sequence was identified in S. pyogenes <SEQ ID 491>. The sequence encodes the amino acid sequence <SEQ ID 492>, which is related to SEQ ID 6992 of WO02/34771. The encoded polypeptide is a 30S ribosomal protein S11.

### EXAMPLE 247

[0701] A DNA sequence was identified in S. pyogenes <SEQ ID 493>. The sequence encodes the amino acid sequence <SEQ ID 494>, which is related to SEQ ID 850 of WO02/34771. The encoded polypeptide is a ribonuclease P protein component.

### EXAMPLE 248

[0702] A DNA sequence was identified in S. pyogenes <SEQ ID 495>. The sequence encodes the amino acid sequence <SEQ ID 496>, which is related to SEQ ID 1048 of WO02/34771.

### EXAMPLE 249

[0703] A DNA sequence was identified in S. pyogenes <SEQ ID 497>. The sequence encodes the amino acid sequence <SEQ ID 498>, which is related to SEQ ID 5904 of WO02/34771.

### EXAMPLE 250

[0704] A DNA sequence was identified in S. pyogenes <SEQ ID 499>. The sequence encodes the amino acid sequence <SEQ ID 500>, which is related to SEQ ID 4164 of WO02/34771.

### EXAMPLE 251

[0705] A DNA sequence was identified in S. pyogenes <SEQ ID 501>. The sequence encodes the amino acid sequence <SEQ ID 502>, which is related to SEQ ID 1458 of WO02/34771. The encoded polypeptide may be phage-associated.

### EXAMPLE 252

[0706] A DNA sequence was identified in S. pyogenes <SEQ ID 503>. The sequence encodes the amino acid sequence <SEQ ID 504>, which is related to SEQ ID 740 of WO02/34771.

### EXAMPLE 253

[0707] A DNA sequence was identified in S. pyogenes <SEQ ID 505>. The sequence encodes the amino acid sequence <SEQ ID 506>, which is related to SEQ ID 7490 of WO02/34771.

### EXAMPLE 254

[0708] A DNA sequence was identified in S. pyogenes <SEQ ID 507>. The sequence encodes the amino acid sequence <SEQ ID 508>, which is related to SEQ ID 5180 of WO02/34771. The encoded polypeptide is a transcriptional regulator (MarR family).

### EXAMPLE 255

[0709] A DNA sequence was identified in S. pyogenes <SEQ ID 509>. The sequence encodes the amino acid sequence <SEQ ID 510>, which is related to SEQ ID 400 of WO02/34771. The encoded polypeptide is a competence protein.

### EXAMPLE 256

[0710] A DNA sequence was identified in S. pyogenes <SEQ ID 511>. The sequence encodes the amino acid sequence <SEQ ID 512>, which is related to SEQ ID 3526 of WO02/34771.

### EXAMPLE 257

[0711] A DNA sequence was identified in S. pyogenes <SEQ ID 513>. The sequence encodes the amino acid sequence <SEQ ID 514>, which is related to SEQ ID 7576 of WO02/34771.

### EXAMPLE 258

[0712] A DNA sequence was identified in S. pyogenes <SEQ ID 515>. The sequence encodes the amino acid sequence <SEQ ID 516>, which is related to SEQ ID 7778 of WO02/34771.

### EXAMPLE 259

[0713] A DNA sequence was identified in S. pyogenes <SEQ ID 517>. The sequence encodes the amino acid sequence <SEQ ID 518>, which is related to SEQ ID 1432 of WO02/34771. The encoded polypeptide may be phage-associated.

### EXAMPLE 260

[0714] A DNA sequence was identified in S. pyogenes <SEQ ID 519>. The sequence encodes the amino acid sequence <SEQ ID 520>, which is related to SEQ ID 8062 of WO02/34771. The encoded polypeptide may be phage-associated.

### EXAMPLE 261

[0715] A DNA sequence was identified in S. pyogenes <SEQ ID 521>. The sequence encodes the amino acid sequence <SEQ ID 522>, which is related to SEQ ID 8068 of WO02/34771. The encoded polypeptide may be phage-associated.

### EXAMPLE 262

[0716] A DNA sequence was identified in S. pyogenes <SEQ ID 523>. The sequence encodes the amino acid sequence <SEQ ID 524>, which is related to SEQ ID 552 of WO02/34771.

### EXAMPLE 263

[0717] A DNA sequence was identified in S. pyogenes <SEQ ID 525>. The sequence encodes the amino acid sequence <SEQ ID 526>, which is related to SEQ ID 7342 of WO02/34771.

### EXAMPLE 264

[0718] A DNA sequence was identified in S. pyogenes <SEQ ID 527>. The sequence encodes the amino acid sequence <SEQ ID 528>, which is related to SEQ ID 4842 of WO02/34771.

### EXAMPLE 265

[0719] A DNA sequence was identified in S. pyogenes <SEQ ID 529>. The sequence encodes the amino acid sequence <SEQ ID 530>, which is related to SEQ ID 7076 of WO02/34771. The encoded polypeptide is a translation initiation factor 3 (IF3).

### EXAMPLE 266

[0720] A DNA sequence was identified in S. pyogenes <SEQ ID 531>. The sequence encodes the amino acid sequence <SEQ ID 532>, which is related to SEQ ID 2806 of WO02/34771.

### EXAMPLE 267

[0721] A DNA sequence was identified in S. pyogenes <SEQ ID 533>. The sequence encodes the amino acid sequence <SEQ ID 534>, which is related to SEQ ID 1582 of WO02/34771. The encoded polypeptide is a PTS system, enzyme IIA component.

### EXAMPLE 268

[0722] A DNA sequence was identified in S. pyogenes <SEQ ID 535>. The sequence encodes the amino acid sequence <SEQ ID 536>, which is related to SEQ ID 5204 of WO02/34771. The encoded polypeptide is a biotoin carboxyl carrier protein.

### EXAMPLE 269

[0723] A DNA sequence was identified in S. pyogenes <SEQ ID 537>. The sequence encodes the amino acid sequence <SEQ ID 538>, which is related to SEQ ID 6314 of WO02/34771. The encoded polypeptide is a topology modulator.

### EXAMPLE 270

[0724] A DNA sequence was identified in S. pyogenes <SEQ ID 539>. The sequence encodes the amino acid sequence <SEQ ID 540>, which is related to SEQ ID 5720 of WO02/34771.

### EXAMPLE 271

[0725] A DNA sequence was identified in S. pyogenes <SEQ ID 541>. The sequence encodes the amino acid sequence <SEQ ID 542>, which is related to SEQ ID 6118 of WO02/34771. The encoded polypeptide is a protein involved in lantibiotic (srt) production.

### EXAMPLE 272

[0726] A DNA sequence was identified in S. pyogenes <SEQ ID 543>. The sequence encodes the amino acid sequence <SEQ ID 544>, which is related to SEQ ID 7042 of WO02/34771. The encoded polypeptide is a DNA-directed RNA polymerase (delta subunit).

### EXAMPLE 273

[0727] A DNA sequence was identified in S. pyogenes <SEQ ID 545>. The sequence encodes the amino acid sequence <SEQ ID 546>, which is related to SEQ ID 6900 of WO02/34771.

### EXAMPLE 274

[0728] A DNA sequence was identified in S. pyogenes <SEQ ID 547>. The sequence encodes the amino acid sequence <SEQ ID 548>, which is related to SEQ ID 7308 of WO02/34771. The encoded polypeptide is a V-type Na+-ATPase subunit E.

### EXAMPLE 275

[0729] A DNA sequence was identified in S. pyogenes <SEQ ID 549>. The sequence encodes the amino acid sequence <SEQ ID 550>, which is related to SEQ ID 932 of WO02/34771.

### EXAMPLE 276

[0730] A DNA sequence was identified in S. pyogenes <SEQ ID 551>. The sequence encodes the amino acid sequence <SEQ ID 552>, which is related to SEQ ID 7698 of WO02/34771.

### EXAMPLE 277

[0731] A DNA sequence was identified in S. pyogenes <SEQ ID 553>. The sequence encodes the amino acid sequence <SEQ ID 554>, which is related to SEQ ID 9074 of WO02/34771. The encoded polypeptide is a peptidoglycan hydrolase.

### EXAMPLE 278

[0732] A DNA sequence was identified in S. pyogenes <SEQ ID 555>. The sequence encodes the amino acid sequence <SEQ ID 556>, which is related to SEQ ID 5276 of WO02/34771.

### EXAMPLE 279

[0733] A DNA sequence was identified in S. pyogenes <SEQ ID 557>. The sequence encodes the amino acid sequence <SEQ ID 558>, which is related to SEQ ID 6578 of WO02/34771. The encoded polypeptide is a thymidine kinase.

### EXAMPLE 280

[0734] A DNA sequence was identified in S. pyogenes <SEQ ID 559>. The sequence encodes the amino acid sequence <SEQ ID 560>, which is related to SEQ ID 5392 of WO02/34771. The encoded polypeptide is a transcriptional regulator.

### EXAMPLE 281

[0735] A DNA sequence was identified in S. pyogenes <SEQ ID 561>. The sequence encodes the amino acid sequence <SEQ ID 562>, which is related to SEQ ID 6826 of WO02/34771. The encoded polypeptide is a recombination protein.

### EXAMPLE 282

[0736] A DNA sequence was identified in S. pyogenes <SEQ ID 563>. The sequence encodes the amino acid sequence <SEQ ID 564>, which is related to SEQ ID 8426 of WO02/34771.

### EXAMPLE 283

[0737] A DNA sequence was identified in S. pyogenes <SEQ ID 565>. The sequence encodes the amino acid sequence <SEQ ID 566>, which is related to SEQ ID 5824 of WO02/34771. The encoded polypeptide is a myo-inositol-1(or 4)monophosphatase.

### EXAMPLE 284

[0738] A DNA sequence was identified in S. pyogenes <SEQ ID 567>. The sequence encodes the amino acid sequence <SEQ ID 568>, which is related to SEQ ID 6260 of WO02/34771.

### EXAMPLE 285

[0739] A DNA sequence was identified in S. pyogenes <SEQ ID 569>. The sequence encodes the amino acid sequence <SEQ ID 570>, which is related to SEQ ID 6392 of WO02/34771. The encoded polypeptide is a 50S ribosomal protein L2.

### EXAMPLE 286

[0740] A DNA sequence was identified in S. pyogenes <SEQ ID 571>. The sequence encodes the amino acid sequence <SEQ ID 572>, which is related to SEQ ID 3740 of WO02/34771. The encoded polypeptide is a fimbria-associated protein.

### EXAMPLE 287

[0741] A DNA sequence was identified in S. pyogenes <SEQ ID 573>. The sequence encodes the amino acid sequence <SEQ ID 574>, which is related to SEQ ID 846 of WO02/34771.

### EXAMPLE 288

[0742] A DNA sequence was identified in S. pyogenes <SEQ ID 575>. The sequence encodes the amino acid sequence <SEQ ID 576>, which is related to SEQ ID 80. of WO02/34771. The encoded polypeptide is a uridylate kinase (UMP-kinase).

### EXAMPLE 289

[0743] A DNA sequence was identified in S. pyogenes <SEQ ID 577>. The sequence encodes the amino acid sequence <SEQ ID 578>, which is related to SEQ ID 7542 of WO02/34771.

### EXAMPLE 290

[0744] A DNA sequence was identified in S. pyogenes <SEQ ID 579>. The sequence encodes the amino acid sequence <SEQ ID 580>, which is related to SEQ ID 5508 of WO02/34771.

### EXAMPLE 291

[0745] A DNA sequence was identified in S. pyogenes <SEQ ID 581>. The sequence encodes the amino acid sequence <SEQ ID 582>, which is related to SEQ ID 3780 of WO02/34771. The encoded polypeptide is a glycosyl transferase.

### EXAMPLE 292

[0746] A DNA sequence was identified in S. pyogenes <SEQ ID 583>. The sequence encodes the amino acid sequence <SEQ ID 584>, which is related to SEQ ID 4220 of WO02/34771.

### EXAMPLE 293

[0747] A DNA sequence was identified in S. pyogenes <SEQ ID 585>. The sequence encodes the amino acid sequence <SEQ ID 586>, which is related to SEQ ID 1922 of WO02/34771. The encoded polypeptide is a DNA processing protein (Smf family).

### EXAMPLE 294

[0748] A DNA sequence was identified in S. pyogenes <SEQ ID 587>. The sequence encodes the amino acid sequence <SEQ ID 588>, which is related to SEQ ID 6172 of WO02/34771.

### EXAMPLE 295

[0749] A DNA sequence was identified in S. pyogenes <SEQ ID 589>. The sequence encodes the amino acid sequence <SEQ ID 590>, which is related to SEQ ID 8010 of WO02/34771.

### EXAMPLE 296

[0750] A DNA sequence was identified in S. pyogenes <SEQ ID 591>. The sequence encodes the amino acid sequence <SEQ ID 592>, which is related to SEQ ID 6722 of WO02/34771. The encoded polypeptide is a 1-acylglycerol-3-phosphate O-acyltransferase.

### EXAMPLE 297

[0751] A DNA sequence was identified in S. pyogenes <SEQ ID 593>. The sequence encodes the amino acid sequence <SEQ ID 594>, which is related to SEQ ID 3136 of WO02/34771.

### EXAMPLE 298

[0752] A DNA sequence was identified in S. pyogenes <SEQ ID 595>. The sequence encodes the amino acid sequence <SEQ ID 596>, which is related to SEQ ID 460 of WO02/34771. The encoded polypeptide is a two-component response regulator.

### EXAMPLE 299

[0753] A DNA sequence was identified in S. pyogenes <SEQ ID 597>. The sequence encodes the amino acid sequence <SEQ ID 598>, which is related to SEQ ID 8128 of WO02/34771.

### EXAMPLE 300

[0754] A DNA sequence was identified in S. pyogenes <SEQ ID 599>. The sequence encodes the amino acid sequence <SEQ ID 600>, which is related to SEQ ID 3466 of WO02/34771.

### EXAMPLE 301

[0755] A DNA sequence was identified in S. pyogenes <SEQ ID 601>. The sequence encodes the amino acid sequence <SEQ ID 602>, which is related to SEQ ID 6250 of WO02/34771. The encoded polypeptide is a deoxyribose-phosphate aldolase.

### EXAMPLE 302

[0756] A DNA sequence was identified in S. pyogenes <SEQ ID 603>. The sequence encodes the amino acid sequence <SEQ ID 604>, which is related to SEQ ID 2120 of WO02/34771. The encoded polypeptide is an ABC transporter (ATP-binding protein).

### EXAMPLE 303

[0757] A DNA sequence was identified in S. pyogenes <SEQ ID 605>. The sequence encodes the amino acid sequence <SEQ ID 606>, which is related to SEQ ID 4118 of WO02/34771.

### EXAMPLE 304

[0758] A DNA sequence was identified in S. pyogenes <SEQ ID 607>. The sequence encodes the amino acid sequence <SEQ ID 608>, which is related to SEQ ID 4546 of WO02/34771. The encoded polypeptide is a possible transcriptional regulator.

### EXAMPLE 305

[0759] A DNA sequence was identified in S. pyogenes <SEQ ID 609>. The sequence encodes the amino acid sequence <SEQ ID 610>, which is related to SEQ ID 3700 of WO02/34771. The encoded polypeptide is a ferrichrome ABC transporter (permease).

### EXAMPLE 306

[0760] A DNA sequence was identified in S. pyogenes <SEQ ID 611>. The sequence encodes the amino acid sequence <SEQ ID 612>, which is related to SEQ ID 40. of WO02/34771. The encoded polypeptide is a transcriptional regulator (LysR family).

### EXAMPLE 307

[0761] A DNA sequence was identified in S. pyogenes <SEQ ID 613>. The sequence encodes the amino acid sequence <SEQ ID 614>, which is related to SEQ ID 5708 of WO02/34771.

### EXAMPLE 308

[0762] A DNA sequence was identified in S. pyogenes <SEQ ID 615>. The sequence encodes the amino acid sequence <SEQ ID 616>, which is related to SEQ ID 4790 of WO02/34771.

### EXAMPLE 309

[0763] A DNA sequence was identified in S. pyogenes <SEQ ID 617>. The sequence encodes the amino acid sequence <SEQ ID 618>, which is related to SEQ ID 106 of WO02/34771. The encoded polypeptide is a phosphate starvation-induced protein.

### EXAMPLE 310

[0764] A DNA sequence was identified in S. pyogenes <SEQ ID 619>. The sequence encodes the amino acid sequence <SEQ ID 620>, which is related to SEQ ID 7488 of WO02/34771.

### EXAMPLE 311

[0765] A DNA sequence was identified in S. pyogenes <SEQ ID 621>. The sequence encodes the amino acid sequence <SEQ ID 622>, which is related to SEQ ID 6784 of WO02/34771. The encoded polypeptide is a multi-drug resistance efflux pump.

### EXAMPLE 312

[0766] A DNA sequence was identified in S. pyogenes <SEQ ID 623>. The sequence encodes the amino acid sequence <SEQ ID 624>, which is related to SEQ ID 7550 of WO02/34771.

### EXAMPLE 313

[0767] A DNA sequence was identified in S. pyogenes <SEQ ID 625>. The sequence encodes the amino acid sequence <SEQ ID 626>, which is related to SEQ ID 5490 of WO02/34771.

### EXAMPLE 314

[0768] A DNA sequence was identified in S. pyogenes <SEQ ID 627>. The sequence encodes the amino acid sequence <SEQ ID 628>, which is related to SEQ ID 5494 of WO02/34771. The encoded polypeptide is a peptide chain release factor 2.

### EXAMPLE 315

[0769] A DNA sequence was identified in S. pyogenes <SEQ ID 629>. The sequence encodes the amino acid sequence <SEQ ID 630>, which is related to SEQ ID 1884 of WO02/34771. The encoded polypeptide is a chorismate synthase.

### EXAMPLE 316

[0770] A DNA sequence was identified in S. pyogenes <SEQ ID 631>. The sequence encodes the amino acid sequence <SEQ ID 632>, which is related to SEQ ID 6080 of WO02/34771. The encoded polypeptide is a thioredoxin reductase.

### EXAMPLE 317

[0771] A DNA sequence was identified in S. pyogenes <SEQ ID 633>. The sequence encodes the amino acid sequence <SEQ ID 634>, which is related to SEQ ID 5988 of WO02/34771. The encoded polypeptide is a mevalonate pyrophosphate decarboxylase.

### EXAMPLE 318

[0772] A DNA sequence was identified in S. pyogenes <SEQ ID 635>. The sequence encodes the amino acid sequence <SEQ ID 636>, which is related to SEQ ID 9190 of WO02/34771. The encoded polypeptide is a collagen-like protein.

### EXAMPLE 319

[0773] A DNA sequence was identified in S. pyogenes <SEQ ID 637>. The sequence encodes the amino acid sequence <SEQ ID 638>, which is related to SEQ ID 1292 of WO02/34771. The encoded polypeptide is a spermidine/putrescine ABC transporter (ATP-binding protein).

### EXAMPLE 320

[0774] A DNA sequence was identified in S. pyogenes <SEQ ID 639>. The sequence encodes the amino acid sequence <SEQ ID 640>, which is related to SEQ ID 7942 of WO02/34771. The encoded polypeptide is a decarboxylase, beta subunit.

### EXAMPLE 321

[0775] A DNA sequence was identified in S. pyogenes <SEQ ID 641>. The sequence encodes the amino acid sequence <SEQ ID 642>, which is related to SEQ ID 6192 of WO02/34771.

### EXAMPLE 322

[0776] A DNA sequence was identified in S. pyogenes <SEQ ID 643>. The sequence encodes the amino acid sequence <SEQ ID 644>, which is related to SEQ ID 6648 of WO02/34771. The encoded polypeptide is a transcription factor.

### EXAMPLE 323

[0777] A DNA sequence was identified in S. pyogenes <SEQ ID 645>. The sequence encodes the amino acid sequence <SEQ ID 646>, which is related to SEQ ID 306 of WO02/34771.

### EXAMPLE 324

[0778] A DNA sequence was identified in S. pyogenes <SEQ ID 647>. The sequence encodes the amino acid sequence <SEQ ID 648>, which is related to SEQ ID 3498 of WO02/34771. The encoded polypeptide is an esterase.

### EXAMPLE 325

[0779] A DNA sequence was identified in S. pyogenes <SEQ ID 649>. The sequence encodes the amino acid sequence <SEQ ID 650>, which is related to SEQ ID 6870 of WO02/34771. The encoded polypeptide is a heat shock transcription repressor protein.

### EXAMPLE 326

[0780] A DNA sequence was identified in S. pyogenes <SEQ ID 651>. The sequence encodes the amino acid sequence <SEQ ID 652>, which is related to SEQ ID 3598 of WO02/34771. The encoded polypeptide is a sucrose operon repressor.

### EXAMPLE 327

[0781] A DNA sequence was identified in S. pyogenes <SEQ ID 653>. The sequence encodes the amino acid sequence <SEQ ID 654>, which is related to SEQ ID 6920 of WO02/34771. The encoded polypeptide is a tagatose 6-phosphate kinase.

### EXAMPLE 328

[0782] A DNA sequence was identified in S. pyogenes <SEQ ID 655>. The sequence encodes the amino acid sequence <SEQ ID 656>, which is related to SEQ ID 64. of WO02/34771. The encoded polypeptide is a transmembrane transport protein.

### EXAMPLE 329

[0783] A DNA sequence was identified in S. pyogenes <SEQ ID 657>. The sequence encodes the amino acid sequence <SEQ ID 658>, which is related to SEQ ID 3354 of WO02/34771. The encoded polypeptide is a recombination protein.

### EXAMPLE 330

[0784] A DNA sequence was identified in S. pyogenes <SEQ ID 659>. The sequence encodes the amino acid sequence <SEQ ID 660>, which is related to SEQ ID 914 of WO02/34771. The encoded polypeptide is a phosphoribosylamine-glycine ligase.

### EXAMPLE 331

[0785] A DNA sequence was identified in S. pyogenes <SEQ ID 661>. The sequence encodes the amino acid sequence <SEQ ID 662>, which is related to SEQ ID 2138 of WO02/34771. The encoded polypeptide is a glucose-inhibited division protein.

### EXAMPLE 332

[0786] A DNA sequence was identified in S. pyogenes <SEQ ID 663>. The sequence encodes the amino acid sequence <SEQ ID 664>, which is related to SEQ ID 8198 of WO02/34771.

### EXAMPLE 333

[0787] A DNA sequence was identified in S. pyogenes <SEQ ID 665>. The sequence encodes the amino acid sequence <SEQ ID 666>, which is related to SEQ ID 60. of WO02/34771. The encoded polypeptide is a surface lipoprotein.

### EXAMPLE 334

[0788] A DNA sequence was identified in S. pyogenes <SEQ ID 667>. The sequence encodes the amino acid sequence <SEQ ID 668>, which is related to SEQ ID 2248 of WO02/34771. The encoded polypeptide is a hyaluronate synthase.

### EXAMPLE 335

[0789] A DNA sequence was identified in S. pyogenes <SEQ ID 669>. The sequence encodes the amino acid sequence <SEQ ID 670>, which is related to SEQ ID 3750 of WO02/34771. The encoded polypeptide is a regulatory protein.

### EXAMPLE 336

[0790] A DNA sequence was identified in S. pyogenes <SEQ ID 671>. The sequence encodes the amino acid sequence <SEQ ID 672>, which is related to SEQ ID 9224 of WO02/34771. The encoded polypeptide is a V-type Na+-ATPase alpha subunit.

### EXAMPLE 337

[0791] A DNA sequence was identified in S. pyogenes <SEQ ID 673>. The sequence encodes the amino acid sequence <SEQ ID 674>, which is related to SEQ ID 4638 of WO02/34771. The encoded polypeptide is a glycine-betaine binding permease protein.

### EXAMPLE 338

[0792] A DNA sequence was identified in S. pyogenes <SEQ ID 675>. The sequence encodes the amino acid sequence <SEQ ID 676>, which is related to SEQ ID 7340 of WO02/34771.

### EXAMPLE 339

[0793] A DNA sequence was identified in S. pyogenes <SEQ ID 677>. The sequence encodes the amino acid sequence <SEQ ID 678>, which is related to SEQ ID 9184 of WO02/34771. The encoded polypeptide is a regulatory protein—RofA related.

### EXAMPLE 340

[0794] A DNA sequence was identified in S. pyogenes <SEQ ID 679>. The sequence encodes the amino acid sequence <SEQ ID 680>, which is related to SEQ ID 5780 of WO02/34771. The encoded polypeptide is an aminotransferase.

### EXAMPLE 341

[0795] A DNA sequence was identified in S. pyogenes <SEQ ID 681>. The sequence encodes the amino acid sequence <SEQ ID 682>, which is related to SEQ ID 4806 of WO02/34771. The encoded polypeptide is an aminodeoxychorismate lyase.

### EXAMPLE 342

[0796] A DNA sequence was identified in S. pyogenes <SEQ ID 683>. The sequence encodes the amino acid sequence <SEQ ID 684>, which is related to SEQ ID 7646 of WO02/34771. The encoded polypeptide may be phage-associated.

### EXAMPLE 343

[0797] A DNA sequence was identified in S. pyogenes <SEQ ID 685>. The sequence encodes the amino acid sequence <SEQ ID 686>, which is related to SEQ ID 4340 of WO02/34771. The encoded polypeptide is a proton-translocating ATPase, alpha subunit.

### EXAMPLE 344

[0798] A DNA sequence was identified in S. pyogenes <SEQ ID 687>. The sequence encodes the amino acid sequence <SEQ ID 688>, which is related to SEQ ID 4322 of WO02/34771. The encoded polypeptide is a uDP-N-acetylglucosamine 1-carboxyvinyltransferase.

### EXAMPLE 345

[0799] A DNA sequence was identified in S. pyogenes <SEQ ID 689>. The sequence encodes the amino acid sequence <SEQ ID 690>, which is related to SEQ ID 5432 of WO02/34771. The encoded polypeptide is a uracil permease.

### EXAMPLE 346

[0800] A DNA sequence was identified in S. pyogenes <SEQ ID 691>. The sequence encodes the amino acid sequence <SEQ ID 692>, which is related to SEQ ID 2820 of WO02/34771. The encoded polypeptide is a DNA topoisomerase IV (subunit B).

### EXAMPLE 347

[0801] A DNA sequence was identified in S. pyogenes <SEQ ID 693>. The sequence encodes the amino acid sequence <SEQ ID 694>, which is related to SEQ ID 7926 of WO02/34771. The encoded polypeptide is a transcarboxylase subunit.

### EXAMPLE 348

[0802] A DNA sequence was identified in S. pyogenes <SEQ ID 695>. The sequence encodes the amino acid sequence <SEQ ID 696>, which is related to SEQ ID 4460 of WO02/34771. The encoded polypeptide is a deacetylase.

### EXAMPLE 349

[0803] A DNA sequence was identified in S. pyogenes <SEQ ID 697>. The sequence encodes the amino acid sequence <SEQ ID 698>, which is related to SEQ ID 4464 of WO02/34771. The encoded polypeptide is a NADP-dependent glyceraldehyde-3-phosphate dehydrogenase.

### EXAMPLE 350

[0804] A DNA sequence was identified in S. pyogenes <SEQ ID 699>. The sequence encodes the amino acid sequence <SEQ ID 700>, which is related to SEQ ID 6734 of WO02/34771. The encoded polypeptide is an aTP-dependent RNA helicase.

### EXAMPLE 351

[0805] A DNA sequence was identified in S. pyogenes <SEQ ID 701>. The sequence encodes the amino acid sequence <SEQ ID 702>, which is related to SEQ ID 2502 of WO02/34771.

### EXAMPLE 352

[0806] A DNA sequence was identified in S. pyogenes <SEQ ID 703>. The sequence encodes the amino acid sequence <SEQ ID 704>, which is related to SEQ ID 3018 of WO02/34771. The encoded polypeptide is a RNA-binding Sun protein.

### EXAMPLE 353

[0807] A DNA sequence was identified in S. pyogenes <SEQ ID 705>. The sequence encodes the amino acid sequence <SEQ ID 706>, which is related to SEQ ID 2972 of WO02/34771.

### EXAMPLE 354

[0808] A DNA sequence was identified in S. pyogenes <SEQ ID 707>. The sequence encodes the amino acid sequence <SEQ ID 708>, which is related to SEQ ID 3654 of WO02/34771.

### EXAMPLE 355

[0809] A DNA sequence was identified in S. pyogenes <SEQ ID 709>. The sequence encodes the amino acid sequence <SEQ ID 710>, which is related to SEQ ID 5636 of WO02/34771.

### EXAMPLE 356

[0810] A DNA sequence was identified in S. pyogenes <SEQ ID 711>. The sequence encodes the amino acid sequence <SEQ ID 712>, which is related to SEQ ID 1342 of WO02/34771. The encoded polypeptide is a histidine kinase.

### EXAMPLE 357

[0811] A DNA sequence was identified in S. pyogenes <SEQ ID 713>. The sequence encodes the amino acid sequence <SEQ ID 714>, which is related to SEQ ID 6256 of WO02/34771.

### EXAMPLE 358

[0812] A DNA sequence was identified in S. pyogenes <SEQ ID 715>. The sequence encodes the amino acid sequence <SEQ ID 716>, which is related to SEQ ID 3376 of WO02/34771.

### EXAMPLE 359

[0813] A DNA sequence was identified in S. pyogenes <SEQ ID 717>. The sequence encodes the amino acid sequence <SEQ ID 718>, which is related to SEQ ID 8406 of WO02/34771. The encoded polypeptide is a DNA primase—phage associated.

### EXAMPLE 360

[0814] A DNA sequence was identified in S. pyogenes <SEQ ID 719>. The sequence encodes the amino acid sequence <SEQ ID 720>, which is related to SEQ ID 5090 of WO02/34771. The encoded polypeptide is an ABC transporter, ATP-binding protein.

### EXAMPLE 361

[0815] A DNA sequence was identified in S. pyogenes <SEQ ID 721>. The sequence encodes the amino acid sequence <SEQ ID 722>, which is related to SEQ ID 4292 of WO02/34771. The encoded polypeptide is an aTP-dependent exonuclease, subunit A.

### EXAMPLE 362

[0816] A DNA sequence was identified in S. pyogenes <SEQ ID 723>. The sequence encodes the amino acid sequence <SEQ ID 724>, which is related to SEQ ID 380 of WO02/34771. The encoded polypeptide is a DNA-dependent RNA polymerase subunit beta.

### EXAMPLE 363

[0817] A DNA sequence was identified in S. pyogenes <SEQ ID 725>. The sequence encodes the amino acid sequence <SEQ ID 726>, which is related to SEQ ID 384 of WO02/34771. The encoded polypeptide is a DNA-dependent RNA polymerase, B′ subunit.

### EXAMPLE 364

[0818] A DNA sequence was identified in S. pyogenes <SEQ ID 727>. The sequence encodes the amino acid sequence <SEQ ID 728>, which is related to SEQ ID 6298 of WO02/34771. The encoded polypeptide is a cell envelope proteinase.

### EXAMPLE 365

[0819] A DNA sequence was identified in S. pyogenes <SEQ ID 729>. The sequence encodes the amino acid sequence <SEQ ID 730>, which is related to SEQ ID 1040 of WO02/34771. The encoded polypeptide is a phosphoenolpyruvate carboxylase.

### EXAMPLE 366

[0820] A DNA sequence was identified in S. pyogenes <SEQ ID 731>. The sequence encodes the amino acid sequence <SEQ ID 732>, which is related to SEQ ID 4172 of WO02/34771. The encoded polypeptide is a calcium-transporting ATPase.

### EXAMPLE 367

[0821] A DNA sequence was identified in S. pyogenes <SEQ ID 733>. The sequence encodes the amino acid sequence <SEQ ID 734>, which is related to SEQ ID 9100 of WO02/34771. The encoded polypeptide is an extracellular hyaluronate lyase.

### EXAMPLE 368

[0822] A DNA sequence was identified in S. pyogenes <SEQ ID 735>. The sequence encodes the amino acid sequence <SEQ ID 736>, which is related to SEQ ID 1918 of WO02/34771. The encoded polypeptide is a DNA topoisomerase 1.

### EXAMPLE 369

[0823] A DNA sequence was identified in S. pyogenes <SEQ ID 737>. The sequence encodes the amino acid sequence <SEQ ID 738>, which is related to SEQ ID 2950 of WO02/34771. The encoded polypeptide is a penicillin-binding protein 1a.

### EXAMPLE 370

[0824] A DNA sequence was identified in S. pyogenes <SEQ ID 739>. The sequence encodes the amino acid sequence <SEQ ID 740>, which is related to SEQ ID 3490 of WO02/34771. The encoded polypeptide is an initiation factor 2.

### EXAMPLE 371

[0825] A DNA sequence was identified in S. pyogenes <SEQ ID 741>. The sequence encodes the amino acid sequence <SEQ ID 742>, which is related to SEQ ID 1590 of WO02/34771.

### EXAMPLE 372

[0826] A DNA sequence was identified in S. pyogenes <SEQ ID 743>. The sequence encodes the amino acid sequence <SEQ ID 744>, which is related to SEQ ID 822 of WO02/34771. The encoded polypeptide is a C5A peptidase precursor.

### EXAMPLE 373

[0827] A DNA sequence was identified in S. pyogenes <SEQ ID 745>. The sequence encodes the amino acid sequence <SEQ ID 746>, which is related to SEQ ID 5136 of WO02/34771. The encoded polypeptide is a peptidyl-tRNA hydrolase.

### EXAMPLE 374

[0828] A DNA sequence was identified in S. pyogenes <SEQ ID 747>. The sequence encodes the amino acid sequence <SEQ ID 748>, which is related to SEQ ID 9080 of WO02/34771. The encoded polypeptide is an amino acid permease.

### EXAMPLE 375

[0829] A DNA sequence was identified in S. pyogenes <SEQ ID 749>. The sequence encodes the amino acid sequence <SEQ ID 750>, which is related to SEQ ID 1010 of WO02/34771. The encoded polypeptide is a ribose-phosphate pyrophosphokinase.

### EXAMPLE 376

[0830] A DNA sequence was identified in S. pyogenes <SEQ ID 751>. The sequence encodes the amino acid sequence <SEQ ID 752>, which is related to SEQ ID 974 of WO02/34771. The encoded polypeptide is a phosphoribosylpyrophosphate amidotransferase.

### EXAMPLE 377

[0831] A DNA sequence was identified in S. pyogenes <SEQ ID 753>. The sequence encodes the amino acid sequence <SEQ ID 754>, which is related to SEQ ID 910 of WO02/34771. The encoded polypeptide is a phosphoribosylaminoimidazole carboxylase 1.

### EXAMPLE 378

[0832] A DNA sequence was identified in S. pyogenes <SEQ ID 755>. The sequence encodes the amino acid sequence <SEQ ID 756>, which is related to SEQ ID 890 of WO02/34771. The encoded polypeptide is a Holliday junction DNA helicase, subunit B.

### EXAMPLE 379

[0833] A DNA sequence was identified in S. pyogenes <SEQ ID 757>. The sequence encodes the amino acid sequence <SEQ ID 758>, which is related to SEQ ID 6422 of WO02/34771. The encoded polypeptide is an alcohol dehydrogenase I.

### EXAMPLE 380

[0834] A DNA sequence was identified in S. pyogenes <SEQ ID 759>. The sequence encodes the amino acid sequence <SEQ ID 760>, which is related to SEQ ID 3988 of WO02/34771. The encoded polypeptide is a preprotein translocase.

### EXAMPLE 381

[0835] A DNA sequence was identified in S. pyogenes <SEQ ID 761>. The sequence encodes the amino acid sequence <SEQ ID 762>, which is related to SEQ ID 364 of WO02/34771. The encoded polypeptide is an ABC transporter (permease).

### EXAMPLE 382

[0836] A DNA sequence was identified in S. pyogenes <SEQ ID 763>. The sequence encodes the amino acid sequence <SEQ ID 764>, which is related to SEQ ID 396 of WO02/34771. The encoded polypeptide is a competence protein, ABC transporter subunit.

### EXAMPLE 383

[0837] A DNA sequence was identified in S. pyogenes <SEQ ID 765>. The sequence encodes the amino acid sequence <SEQ ID 766>, which is related to SEQ ID 404 of WO02/34771.

### EXAMPLE 384

[0838] A DNA sequence was identified in S. pyogenes <SEQ ID 767>. The sequence encodes the amino acid sequence <SEQ ID 768>, which is related to SEQ ID 430 of WO02/34771.

### EXAMPLE 385

[0839] A DNA sequence was identified in S. pyogenes <SEQ ID 769>. The sequence encodes the amino acid sequence <SEQ ID 770>, which is related to SEQ ID 7282 of WO02/34771.

### EXAMPLE 386

[0840] A DNA sequence was identified in S. pyogenes <SEQ ID 771>. The sequence encodes the amino acid sequence <SEQ D 772>, which is related to SEQ ID 7292 of WO02/34771. The encoded polypeptide is a short-chain fatty acids transporter.

### EXAMPLE 387

[0841] A DNA sequence was identified in S. pyogenes <SEQ ID 773>. The sequence encodes the amino acid sequence <SEQ ID 774>, which is related to SEQ ID 7296 of WO02/34771. The encoded polypeptide is an acetyl-CoA:acetoacetyl-CoA transferase alpha subunit.

### EXAMPLE 388

[0842] A DNA sequence was identified in S. pyogenes <SEQ ID 775>. The sequence encodes the amino acid sequence <SEQ ID 776>, which is related to SEQ ID 7302 of WO02/34771.

### EXAMPLE 389

[0843] A DNA sequence was identified in S. pyogenes <SEQ ID 777>. The sequence encodes the amino acid sequence <SEQ ID 778>, which is related to SEQ ID 7306 of WO02/34771. The encoded polypeptide is a V-type Na+-ATPase subunit K.

### EXAMPLE 390

[0844] A DNA sequence was identified in S. pyogenes <SEQ ID 779>. The sequence encodes the amino acid sequence <SEQ ID 780>, which is related to SEQ ID 7316 of WO02/34771. The encoded polypeptide is a V-type Na+-ATPase subunit D.

### EXAMPLE 391

[0845] A DNA sequence was identified in S. pyogenes <SEQ ID 781>. The sequence encodes the amino acid sequence <SEQ ID 782>, which is related to SEQ ID 9062 of WO02/34771. The encoded polypeptide is an ABC transporter (lipoprotein).

### EXAMPLE 392

[0846] A DNA sequence was identified in S. pyogenes <SEQ ID 783>. The sequence encodes the amino acid sequence <SEQ ID 784>, which is related to SEQ ID 6270 of WO02/34771. The encoded polypeptide is a transcription antitermination factor.

### EXAMPLE 393

[0847] A DNA sequence was identified in S. pyogenes <SEQ ID 785>. The sequence encodes the amino acid sequence <SEQ ID 786>, which is related to SEQ ID 7322 of WO02/34771.

### EXAMPLE 394

[0848] A DNA sequence was identified in S. pyogenes <SEQ ID 787>. The sequence encodes the amino acid sequence <SEQ ID 788>, which is related to SEQ ID 7324 of WO02/34771. The encoded polypeptide is a streptolysin O precursor.

### EXAMPLE 395

[0849] A DNA sequence was identified in S. pyogenes <SEQ ID 789>. The sequence encodes the amino acid sequence <SEQ ID 790>, which is related to SEQ ID 7332 of WO02/34771. The encoded polypeptide is a cystathionine beta-lyase.

### EXAMPLE 396

[0850] A DNA sequence was identified in S. pyogenes <SEQ ID 791>. The sequence encodes the amino acid sequence <SEQ ID 792>, which is related to SEQ ID 4580 of WO02/34771.

### EXAMPLE 397

[0851] A DNA sequence was identified in S. pyogenes <SEQ ID 793>. The sequence encodes the amino acid sequence <SEQ ID 794>, which is related to SEQ ID 4596 of WO02/34771. The encoded polypeptide is a hexulose-6-phosphate isomerase.

### EXAMPLE 398

[0852] A DNA sequence was identified in S. pyogenes <SEQ ID 795>. The sequence encodes the amino acid sequence <SEQ ID 796>, which is related to SEQ ID 4624 of WO02/34771. The encoded polypeptide is a transcriptional regulator.

### EXAMPLE 399

[0853] A DNA sequence was identified in S. pyogenes <SEQ ID 797>. The sequence encodes the amino acid sequence <SEQ ID 798>, which is related to SEQ ID 7350 of WO02/34771. The encoded polypeptide is a nicotinate-nucleotide pyrophosphorylase.

### EXAMPLE 400

[0854] A DNA sequence was identified in S. pyogenes <SEQ ID 799>. The sequence encodes the amino acid sequence <SEQ ID 800>, which is related to SEQ ID 344 herein.

### EXAMPLE 401

[0855] A DNA sequence was identified in S. pyogenes <SEQ ID 801>. The sequence encodes the amino acid sequence <SEQ ID 802>, which is related to SEQ ID 9186 of WO02/34771. The encoded polypeptide is a uDP-glucose pyrophosphorylase.

### EXAMPLE 402

[0856] A DNA sequence was identified in S. pyogenes <SEQ ID 803>. The sequence encodes the amino acid sequence <SEQ ID 804>, which is related to SEQ ID 332 herein.

### EXAMPLE 403

[0857] A DNA sequence was identified in S. pyogenes <SEQ ID 805>. The sequence encodes the amino acid sequence <SEQ ID 806>, which is related to SEQ ID 160 of WO02/34771. The encoded polypeptide is an ABC transporter (ATP-binding protein).

### EXAMPLE 404

[0858] A DNA sequence was identified in S. pyogenes <SEQ ID 807>. The sequence encodes the amino acid sequence <SEQ ID 808>, which is related to SEQ ID 6430 of WO02/34771.

### EXAMPLE 405

[0859] A DNA sequence was identified in S. pyogenes <SEQ ID 809>. The sequence encodes the amino acid sequence <SEQ ID 810>, which is related to SEQ ID 6470 of WO02/34771.

### EXAMPLE 406

[0860] A DNA sequence was identified in S. pyogenes <SEQ ID 811>. The sequence encodes the amino acid sequence <SEQ ID 812>, which is related to SEQ ID 7370 of WO02/34771.

### EXAMPLE 407

[0861] A DNA sequence was identified in S. pyogenes <SEQ ID 813>. The sequence encodes the amino acid sequence <SEQ ID 814>, which is related to SEQ ID 942 of WO02/34771. The encoded polypeptide is a sugar transport system (permease).

### EXAMPLE 408

[0862] A DNA sequence was identified in S. pyogenes <SEQ ID 815>. The sequence encodes the amino acid sequence <SEQ ID 816>, which is related to SEQ ID 5724 of WO02/34771.

### EXAMPLE 409

[0863] A DNA sequence was identified in S. pyogenes <SEQ ID 817>. The sequence encodes the amino acid sequence <SEQ ID 818>, which is related to SEQ ID 5714 of WO02/34771. The encoded polypeptide is a dimethyladenosine transferase.

### EXAMPLE 410

[0864] A DNA sequence was identified in S. pyogenes <SEQ ID 819>. The sequence encodes the amino acid sequence <SEQ ID 820>, which is related to SEQ ID 2158 of WO02/34771. The encoded polypeptide is an amino acid ABC transporter (ATP-binding protein).

### EXAMPLE 411

[0865] A DNA sequence was identified in S. pyogenes <SEQ ID 821>. The sequence encodes the amino acid sequence <SEQ ID 822>, which is related to SEQ ID 1194 of WO02/34771. The encoded polypeptide is a glutamine-binding periplasmic protein.

### EXAMPLE 412

[0866] A DNA sequence was identified in S. pyogenes <SEQ ID 823>. The sequence encodes the amino acid sequence <SEQ ID 824>, which is related to SEQ ID 5796 of WO02/34771. The encoded polypeptide is a negative regulator of genetic competence.

### EXAMPLE 413

[0867] A DNA sequence was identified in S. pyogenes <SEQ ID 825>. The sequence encodes the amino acid sequence <SEQ HD 826>, which is related to SEQ ID 9070 of WO02/34771. The encoded polypeptide is an oligopeptidepermease.

### EXAMPLE 414

[0868] A DNA sequence was identified in S. pyogenes <SEQ ID 827>. The sequence encodes the amino acid sequence <SEQ ID 828>, which is related to SEQ ID 7072 of WO02/34771. The encoded polypeptide is a transposase, S1]548.

### EXAMPLE 415

[0869] A DNA sequence was identified in S. pyogenes <SEQ ID 829>. The sequence encodes the amino acid sequence <SEQ ID 830>, which is related to SEQ ID 5614 of WO02/34771.

### EXAMPLE 416

[0870] A DNA sequence was identified in S. pyogenes <SEQ ID 831>. The sequence encodes the amino acid sequence <SEQ ID 832>, which is related to SEQ ID 7402 of WO02/34771.

### EXAMPLE 417

[0871] A DNA sequence was identified in S. pyogenes <SEQ ID 833>. The sequence encodes the amino acid sequence <SEQ ID 834>, which is related to SEQ ID 2132 of WO02/34771.

### EXAMPLE 418

[0872] A DNA sequence was identified in S. pyogenes <SEQ ID 835>. The sequence encodes the amino acid sequence <SEQ ID 836>, which is related to SEQ ID 4786 of WO02/34771. The encoded polypeptide is an acylphosphatase.

### EXAMPLE 419

[0873] A DNA sequence was identified in S. pyogenes <SEQ ID 837>. The sequence encodes the amino acid sequence <SEQ ID 838>, which is related to SEQ ID 4752 of WO02/34771.

### EXAMPLE 420

[0874] A DNA sequence was identified in S. pyogenes <SEQ ID 839>. The sequence encodes the amino acid sequence <SEQ ID 840>, which is related to SEQ ID 4728 of WO02/34771.

### EXAMPLE 421

[0875] A DNA sequence was identified in S. pyogenes <SEQ ID 841>. The sequence encodes the amino acid sequence <SEQ ID 842>, which is related to SEQ ID 4724 of WO02/34771.

### EXAMPLE 422

[0876] A DNA sequence was identified in S. pyogenes <SEQ ID 843>. The sequence encodes the amino acid sequence <SEQ ID 844>, which is related to SEQ ID 6224 of WO02/34771. The encoded polypeptide is a rRNA methylase.

### EXAMPLE 423

[0877] A DNA sequence was identified in S. pyogenes <SEQ ID 845>. The sequence encodes the amino acid sequence <SEQ ID 846>, which is related to SEQ ID 3728 of WO02/34771.

### EXAMPLE 424

[0878] A DNA sequence was identified in S. pyogenes <SEQ ID 847>. The sequence encodes the amino acid sequence <SEQ ID 848>, which is related to SEQ ID 3720 of WO02/34771. The encoded polypeptide is a hemolysin.

### EXAMPLE 425

[0879] A DNA sequence was identified in S. pyogenes <SEQ ID 849>. The sequence encodes the amino acid sequence <SEQ ID 850>, which is related to SEQ ID 3716 of WO02/34771. The encoded polypeptide is a pyruvate-formate lyase activating enzyme.

### EXAMPLE 426

[0880] A DNA sequence was identified in S. pyogenes <SEQ ID 851>. The sequence encodes the amino acid sequence <SEQ ID 852>, which is related to SEQ ID 2172 of WO02/34771. The encoded polypeptide is a thymidylate kinase.

### EXAMPLE 427

[0881] A DNA sequence was identified in S. pyogenes <SEQ ID 853>. The sequence encodes the amino acid sequence <SEQ ID 854>, which is related to SEQ ID 7424 of WO02/34771.

### EXAMPLE 428

[0882] A DNA sequence was identified in S. pyogenes <SEQ ID 855>. The sequence encodes the amino acid sequence <SEQ ID 856>, which is related to SEQ ID 7456 of WO02/34771.

### EXAMPLE 429

[0883] A DNA sequence was identified in S. pyogenes <SEQ ID 857>. The sequence encodes the amino acid sequence <SEQ ID 858>, which is related to SEQ ID 2256 of WO02/34771.

### EXAMPLE 430

[0884] A DNA sequence was identified in S. pyogenes <SEQ ID 859>. The sequence encodes the amino acid sequence <SEQ ID 860>, which is related to SEQ ID 6446 of WO02/34771. The encoded polypeptide is a glycerol-3-phosphate transporter.

### EXAMPLE 431

[0885] A DNA sequence was identified in S. pyogenes <SEQ ID 861>. The sequence encodes the amino acid sequence <SEQ ID 862>, which is related to SEQ ID 2282 of WO02/34771.

### EXAMPLE 432

[0886] A DNA sequence was identified in S. pyogenes <SEQ ID 863>. The sequence encodes the amino acid sequence <SEQ ID 864>, which is related to SEQ ID 3178 of WO02/34771. The encoded polypeptide is a metal binding protein of ABC transporter (lipoprotein).

### EXAMPLE 433

[0887] A DNA sequence was identified in S. pyogenes <SEQ ID 865>. The sequence encodes the amino acid sequence <SEQ ID 866>, which is related to SEQ ID 8766 of WO02/34771. The encoded polypeptide is an ABC transporter (ATP-binding protein).

### EXAMPLE 434

[0888] A DNA sequence was identified in S. pyogenes <SEQ ID 867>. The sequence encodes the amino acid sequence <SEQ ID 868>, which is related to SEQ ID 52. of WO02/34771. The encoded polypeptide is a 50S ribosomal protein L11.

### EXAMPLE 435

[0889] A DNA sequence was identified in S. pyogenes <SEQ ID 869>. The sequence encodes the amino acid sequence <SEQ ID 870>, which is related to SEQ ID 98. of WO02/34771.

### EXAMPLE 436

[0890] A DNA sequence was identified in S. pyogenes <SEQ ID 871>. The sequence encodes the amino acid sequence <SEQ ID 872>, which is related to SEQ ID 120 of WO02/34771.

### EXAMPLE 437

[0891] A DNA sequence was identified in S. pyogenes <SEQ ID 873>. The sequence encodes the amino acid sequence <SEQ ID 874>, which is related to SEQ ID 112 of WO02/34771.

### EXAMPLE 438

[0892] A DNA sequence was identified in S. pyogenes <SEQ ID 875>. The sequence encodes the amino acid sequence <SEQ ID 876>, which is related to SEQ ID 628 of WO02/34771. The encoded polypeptide is a positive transcriptional regulator.

### EXAMPLE 439

[0893] A DNA sequence was identified in S. pyogenes <SEQ ID 877>. The sequence encodes the amino acid sequence <SEQ ID 878>, which is related to SEQ ID 7516 of WO02/34771.

### EXAMPLE 440

[0894] A DNA sequence was identified in S. pyogenes <SEQ ID 879>. The sequence encodes the amino acid sequence <SEQ ID 880>, which is related to SEQ ID 3878 of WO02/34771.

### EXAMPLE 441

[0895] A DNA sequence was identified in S. pyogenes <SEQ ID 881>. The sequence encodes the amino acid sequence <SEQ ID 882>, which is related to SEQ ID 1206 of WO02/34771.

### EXAMPLE 442

[0896] A DNA sequence was identified in S. pyogenes <SEQ ID 883>. The sequence encodes the amino acid sequence <SEQ ID 884>, which is related to SEQ ID 334 herein. The encoded polypeptide is a positive regulator.

### EXAMPLE 443

[0897] A DNA sequence was identified in S. pyogenes <SEQ ID 885>. The sequence encodes the amino acid sequence <SEQ ID 886>, which is related to SEQ ID 7528 of WO02/34771.

### EXAMPLE 444

[0898] A DNA sequence was identified in S. pyogenes <SEQ ID 887>. The sequence encodes the amino acid sequence <SEQ ID 888>, which is related to SEQ ID 1336 of WO02/34771. The encoded polypeptide is a transposase.

### EXAMPLE 445

[0899] A DNA sequence was identified in S. pyogenes <SEQ ID 889>. The sequence encodes the amino acid sequence <SEQ ID 890>, which is related to SEQ ID 1118 of WO02/34771. The encoded polypeptide is a Hpr kinase/phosphatase.

### EXAMPLE 446

[0900] A DNA sequence was identified in S. pyogenes <SEQ ID 891>. The sequence encodes the amino acid sequence <SEQ ID 892>, which is related to SEQ ID 1074 of WO02/34771. The encoded polypeptide is a lysyl-tRNA synthetase.

### EXAMPLE 447

[0901] A DNA sequence was identified in S. pyogenes <SEQ ID 893>. The sequence encodes the amino acid sequence <SEQ ID 894>, which is related to SEQ ID 7586 of WO02/34771. The encoded polypeptide is a glutathione peroxidase.

### EXAMPLE 448

[0902] A DNA sequence was identified in S. pyogenes <SEQ ID 895>. The sequence encodes the amino acid sequence <SEQ ID 896>, which is related to SEQ ID 1044 of WO02/34771. The encoded polypeptide is an oligopeptidase.

### EXAMPLE 449

[0903] A DNA sequence was identified in S. pyogenes <SEQ ID 897>. The sequence encodes the amino acid sequence <SEQ ID 898>, which is related to SEQ ID 1022 of WO02/34771. The encoded polypeptide is a translation elongation factor EF-Tu.

### EXAMPLE 450

[0904] A DNA sequence was identified in S. pyogenes <SEQ ID 899>. The sequence encodes the amino acid sequence <SEQ ID 900>, which is related to SEQ ID 5464 of WO02/34771. The encoded polypeptide is a peptidoglycan branched peptide synthesis protein, serine/alanine adding enzyme.

### EXAMPLE 451

[0905] A DNA sequence was identified in S. pyogenes <SEQ ID 901>. The sequence encodes the amino acid sequence <SEQ ID 902>, which is related to SEQ ID 2366 of WO02/34771. The encoded polypeptide is a transcriptional regulator (LacI family).

### EXAMPLE 452

[0906] A DNA sequence was identified in S. pyogenes <SEQ ID 903>. The sequence encodes the amino acid sequence <SEQ ID 904>, which is related to SEQ ID 2362 of WO02/34771.

### EXAMPLE 453

[0907] A DNA sequence was identified in S. pyogenes <SEQ ID 905>. The sequence encodes the amino acid sequence <SEQ ID 906>, which is related to SEQ ID 2358 of WO02/34771. The encoded polypeptide is a PTS dependent galactosamine IID component.

### EXAMPLE 454

[0908] A DNA sequence was identified in S. pyogenes <SEQ ID 907>. The sequence encodes the amino acid sequence <SEQ ID 908>, which is related to SEQ ID 1264 of WO02/34771. The encoded polypeptide is a 2-keto-3-deoxygluconate kinase.

### EXAMPLE 455

[0909] A DNA sequence was identified in S. pyogenes <SEQ ID 909>. The sequence encodes the amino acid sequence <SEQ ID 910>, which is related to SEQ ID 5502 of WO02/34771. The encoded polypeptide is a cell-division protein.

### EXAMPLE 456

[0910] A DNA sequence was identified in S. pyogenes <SEQ ID 911>. The sequence encodes the amino acid sequence <SEQ ID 912>, which is related to SEQ ID 7606 of WO02/34771. The encoded polypeptide is a Cro-like protein, phage associated.

### EXAMPLE 457

[0911] A DNA sequence was identified in S. pyogenes <SEQ ID 913>. The sequence encodes the amino acid sequence <SEQ ID 914>, which is related to SEQ ID 7614 of WO02/34771. The encoded polypeptide may be phage-associated.

### EXAMPLE 458

[0912] A DNA sequence was identified in S. pyogenes <SEQ ID 915>. The sequence encodes the amino acid sequence <SEQ ID 916>, which is related to SEQ ID 336 herein. The encoded polypeptide is a DEAD box family helicase, phage associated.

### EXAMPLE 459

[0913] A DNA sequence was identified in S. pyogenes <SEQ ID 917>. The sequence encodes the amino acid sequence <SEQ ID 918>, which is related to SEQ ID 7630 of WO02/34771. The encoded polypeptide may be phage-associated.

### EXAMPLE 460

[0914] A DNA sequence was identified in S. pyogenes <SEQ ID 919>. The sequence encodes the amino acid sequence <SEQ ID 920>, which is related to SEQ ID 7652 of WO02/34771. The encoded polypeptide may be phage-associated.

### EXAMPLE 461

[0915] A DNA sequence was identified in S. pyogenes <SEQ ID 921>. The sequence encodes the amino acid sequence <SEQ ID 922>, which is related to SEQ ID 7662 of WO02/34771. The encoded polypeptide may be phage-associated.

### EXAMPLE 462

[0916] A DNA sequence was identified in S. pyogenes <SEQ ID 923>. The sequence encodes the amino acid sequence <SEQ ID 924>, which is related to SEQ ID 338 herein. The encoded polypeptide may be phage-associated.

### EXAMPLE 463

[0917] A DNA sequence was identified in S. pyogenes <SEQ ID 925>. The sequence encodes the amino acid sequence <SEQ ID 926>, which is related to SEQ ID 340 herein. The encoded polypeptide is a transcriptional regulator (GntR family).

### EXAMPLE 464

[0918] A DNA sequence was identified in S. pyogenes <SEQ ID 927>. The sequence encodes the amino acid sequence <SEQ ID 928>, which is related to SEQ ID 1562 of WO02/34771. The encoded polypeptide is a transposase.

### EXAMPLE 465

[0919] A DNA sequence was identified in S. pyogenes <SEQ ID 929>. The sequence encodes the amino acid sequence <SEQ ID 930>, which is related to SEQ ID 1322 of WO02/34771.

### EXAMPLE 466

[0920] A DNA sequence was identified in S. pyogenes <SEQ ID 931>. The sequence encodes the amino acid sequence <SEQ ID 932>, which is related to SEQ ID 598 of WO02/34771. The encoded polypeptide is an extracellular matrix binding protein.

### EXAMPLE 467

[0921] A DNA sequence was identified in S. pyogenes <SEQ ID 933>. The sequence encodes the amino acid sequence <SEQ ID 934>, which is related to SEQ ID 4304 of WO02/34771. The encoded polypeptide is a phenylalanyl-tRNA synthetase (beta subunit).

### EXAMPLE 468

[0922] A DNA sequence was identified in S. pyogenes <SEQ ID 935>. The sequence encodes the amino acid sequence <SEQ ID 936>, which is related to SEQ ID 6500 of WO02/34771. The encoded polypeptide is an ABC transporter (ATP-binding protein).

### EXAMPLE 469

[0923] A DNA sequence was identified in S. pyogenes <SEQ ID 937>. The sequence encodes the amino acid sequence <SEQ ID 938>, which is related to SEQ ID 3790 of WO02/34771. The encoded polypeptide is a dTDP-4-keto-L-rhamnose reductase.

### EXAMPLE 470

[0924] A DNA sequence was identified in S. pyogenes <SEQ ID 939>. The sequence encodes the amino acid sequence <SEQ ID 940>, which is related to SEQ ID 7724 of WO02/34771. The encoded polypeptide is an ABC-transporter (permease protein)—possibly involved in cell wall localization and side chain formation of rhamnose-glucose polysaccharide.

### EXAMPLE 471

[0925] A DNA sequence was identified in S. pyogenes <SEQ ID 941>. The sequence encodes the amino acid sequence <SEQ ID 942>, which is related to SEQ ID 7732 of WO02/34771.

### EXAMPLE 472

[0926] A DNA sequence was identified in S. pyogenes <SEQ ID 943>. The sequence encodes the amino acid sequence <SEQ ID 944>, which is related to SEQ ID 3678 of WO02/34771. The encoded polypeptide is a tripeptidase.

### EXAMPLE 473

[0927] A DNA sequence was identified in S. pyogenes <SEQ ID 945>. The sequence encodes the amino acid sequence <SEQ ID 946>, which is related to SEQ ID 1902 of WO02/34771.

### EXAMPLE 474

[0928] A DNA sequence was identified in S. pyogenes <SEQ ID 947>. The sequence encodes the amino acid sequence <SEQ ID 948>, which is related to SEQ ID 1876 of WO02/34771. The encoded polypeptide is a glutathione reductase (GR).

### EXAMPLE 475

[0929] A DNA sequence was identified in S. pyogenes <SEQ ID 949>. The sequence encodes the amino acid sequence <SEQ ID 950>, which is related to SEQ ID 342 herein. The encoded polypeptide is a folyl-polyglutamate synthetase.

### EXAMPLE 476

[0930] A DNA sequence was identified in S. pyogenes <SEQ ID 951>. The sequence encodes the amino acid sequence <SEQ ID 952>, which is related to SEQ ID 2034 of WO02/34771. The encoded polypeptide is an aspartate transcarbamoylase.

### EXAMPLE 477

[0931] A DNA sequence was identified in S. pyogenes <SEQ ID 953>. The sequence encodes the amino acid sequence <SEQ ID 954>, which is related to SEQ ID 2026 of WO02/34771. The encoded polypeptide is a carbamoylphosphate synthetase.

### EXAMPLE 478

[0932] A DNA sequence was identified in S. pyogenes <SEQ ID 955>. The sequence encodes the amino acid sequence <SEQ ID 956>, which is related to SEQ ID 2530 of WO02/34771. The encoded polypeptide is an ABC transporter (ATP-binding protein).

### EXAMPLE 479

[0933] A DNA sequence was identified in S. pyogenes <SEQ ID 957>. The sequence encodes the amino acid sequence <SEQ ID 958>, which is related to SEQ ID 2574 of WO02/34771. The encoded polypeptide is a glycerophosphodiester phosphodiesterase.

### EXAMPLE 480

[0934] A DNA sequence was identified in S. pyogenes <SEQ ID 959>. The sequence encodes the amino acid sequence <SEQ ID 960>, which is related to SEQ ID 770 of WO02/34771.

### EXAMPLE 481

[0935] A DNA sequence was identified in S. pyogenes <SEQ ID 961>. The sequence encodes the amino acid sequence <SEQ ID 962>, which is related to SEQ ID 6038 of WO02/34771. The encoded polypeptide is a poly(A) polymerase.

### EXAMPLE 482

[0936] A DNA sequence was identified in S. pyogenes <SEQ ID 963>. The sequence encodes the amino acid sequence <SEQ ID 964>, which is related to SEQ ID 5982 of WO02/34771. The encoded polypeptide is a phosphomevalonate kinase.

### EXAMPLE 483

[0937] A DNA sequence was identified in S. pyogenes <SEQ ID 965>. The sequence encodes the amino acid sequence <SEQ ID 966>, which is related to SEQ ID 5978 of WO02/34771.

### EXAMPLE 484

[0938] A DNA sequence was identified in S. pyogenes <SEQ ID 967>. The sequence encodes the amino acid sequence <SEQ ID 968>, which is related to SEQ ID 5958 of WO02/34771. The encoded polypeptide is a 3-hydroxy-3-methylglutaryl-coenzyme A synthase (HMG-CoA synthase).

### EXAMPLE 485

[0939] A DNA sequence was identified in S. pyogenes <SEQ ID 969>. The sequence encodes the amino acid sequence <SEQ ID 970>, which is related to SEQ ID 5954 of WO02/34771. The encoded polypeptide is a thymidylate synthase.

### EXAMPLE 486

[0940] A DNA sequence was identified in S. pyogenes <SEQ ID 971>. The sequence encodes the amino acid sequence <SEQ ID 972>, which is related to SEQ ID 9078 of WO02/34771. The encoded polypeptide is an arsenate reductase.

### EXAMPLE 487

[0941] A DNA sequence was identified in S. pyogenes <SEQ ID 973>. The sequence encodes the amino acid sequence <SEQ ID 974>, which is related to SEQ ID 2756 of WO02/34771. The encoded polypeptide is a histidine protein kinase.

### EXAMPLE 488

[0942] A DNA sequence was identified in S. pyogenes <SEQ ID 975>. The sequence encodes the amino acid sequence <SEQ ID 976>, which is related to SEQ ID 2814 of WO02/34771.

### EXAMPLE 489

[0943] A DNA sequence was identified in S. pyogenes <SEQ ID 977>. The sequence encodes the amino acid sequence <SEQ ID 978>, which is related to SEQ ID 2824 of WO02/34771. The encoded polypeptide is a DNA topoisomerase IV (subunit C).

### EXAMPLE 490

[0944] A DNA sequence was identified in S. pyogenes <SEQ ID 979>. The sequence encodes the amino acid sequence <SEQ ID 980>, which is related to SEQ ID 2828 of WO02/34771. The encoded polypeptide is a branched-chain-amino-acid aminotransferase.

### EXAMPLE 491

[0945] A DNA sequence was identified in S. pyogenes <SEQ ID 981>. The sequence encodes the amino acid sequence <SEQ ID 982>, which is related to SEQ ID 2832 of WO02/34771.

### EXAMPLE 492

[0946] A DNA sequence was identified in S. pyogenes <SEQ ID 983>. The sequence encodes the amino acid sequence <SEQ ID 984>, which is related to SEQ ID 2604 of WO02/34771. The encoded polypeptide is an exfoliative toxin.

### EXAMPLE 493

[0947] A DNA sequence was identified in S. pyogenes <SEQ ID 985>. The sequence encodes the amino acid sequence <SEQ ID 986>, which is related to SEQ ID 2616 of WO02/34771. The encoded polypeptide is a GTP-binding protein.

### EXAMPLE 494

[0948] A DNA sequence was identified in S. pyogenes <SEQ ID 987>. The sequence encodes the amino acid sequence <SEQ ID 988>, which is related to SEQ ID 2620 of WO02/34771.

### EXAMPLE 495

[0949] A DNA sequence was identified in S. pyogenes <SEQ ID 989>. The sequence encodes the amino acid sequence <SEQ ID 990>, which is related to SEQ ID 2652 of WO02/34771.

### EXAMPLE 496

[0950] A DNA sequence was identified in S. pyogenes <SEQ ID 991>. The sequence encodes the amino acid sequence <SEQ ID 992>, which is related to SEQ ID 7784 of WO02/34771.

### EXAMPLE 497

[0951] A DNA sequence was identified in S. pyogenes <SEQ ID 993>. The sequence encodes the amino acid sequence <SEQ ID 994>, which is related to SEQ ID 7786 of WO02/34771.

### EXAMPLE 498

[0952] A DNA sequence was identified in S. pyogenes <SEQ ID 995>. The sequence encodes the amino acid sequence <SEQ ID 996>, which is related to SEQ ID 7794 of WO02/34771.

### EXAMPLE 499

[0953] A DNA sequence was identified in S. pyogenes <SEQ ID 997>. The sequence encodes the amino acid sequence <SEQ ID 998>, which is related to SEQ ID 7812 of WO02/34771.

### EXAMPLE 500

[0954] A DNA sequence was identified in S. pyogenes <SEQ ID 999>. The sequence encodes the amino acid sequence <SEQ ID 1000>, which is related to SEQ ID 7826 of WO02/34771. The encoded polypeptide may be phage-associated.

### EXAMPLE 501

[0955] A DNA sequence was identified in S. pyogenes <SEQ ID 1001>. The sequence encodes the amino acid sequence <SEQ ID 1002>, which is related to SEQ ID 7828 of WO02/34771. The encoded polypeptide is a terminase, small subunit—phage associated.

### EXAMPLE 502

[0956] A DNA sequence was identified in S. pyogenes <SEQ ID 1003>. The sequence encodes the amino acid sequence <SEQ ID 1004>, which is related to SEQ ID 7830 of WO02/34771. The encoded polypeptide is a terminase, large subunit—phage associated.

### EXAMPLE 503

[0957] A DNA sequence was identified in S. pyogenes <SEQ ID 1005>. The sequence encodes the amino acid sequence <SEQ ID 1006>, which is related to SEQ ID 7842 of WO02/34771.

### EXAMPLE 504

[0958] A DNA sequence was identified in S. pyogenes <SEQ ID 1007>. The sequence encodes the amino acid sequence <SEQ ID 1008>, which is related to SEQ ID 7846 of WO02/34771. The encoded polypeptide may be phage-associated.

### EXAMPLE 505

[0959] A DNA sequence was identified in S. pyogenes <SEQ ID 1009>. The sequence encodes the amino acid sequence <SEQ ID 1010>, which is related to SEQ ID 7854 of WO02/34771. The encoded polypeptide may be phage-associated.

### EXAMPLE 506

[0960] A DNA sequence was identified in S. pyogenes <SEQ ID 1011>. The sequence encodes the amino acid sequence <SEQ ID 1012>, which is related to SEQ ID 7890 of WO02/34771. The encoded polypeptide is a streptococcal exotoxin I.

### EXAMPLE 507

[0961] A DNA sequence was identified in S. pyogenes <SEQ ID 1013>. The sequence encodes the amino acid sequence <SEQ ID 1014>, which is related to SEQ ID 2700 of WO02/34771.

### EXAMPLE 508

[0962] A DNA sequence was identified in S. pyogenes <SEQ ID 1015>. The sequence encodes the amino acid sequence <SEQ ID 1016>, which is related to SEQ ID 2708 of WO02/34771. The encoded polypeptide is a fibronectin-binding protein-like protein A.

### EXAMPLE 509

[0963] A DNA sequence was identified in S. pyogenes <SEQ ID 1017>. The sequence encodes the amino acid sequence <SEQ ID 1018>, which is related to SEQ ID 7898 of WO02/34771.

### EXAMPLE 510

[0964] A DNA sequence was identified in S. pyogenes <SEQ ID 1019>. The sequence encodes the amino acid sequence <SEQ ID 1020>, which is related to SEQ ID 2716 of WO02/34771. The encoded polypeptide is an ABC transport protein (permease).

### EXAMPLE 511

[0965] A DNA sequence was identified in S. pyogenes <SEQ ID 1021>. The sequence encodes the amino acid sequence <SEQ ID 1022>, which is related to SEQ ID 4276 of WO02/34771. The encoded polypeptide is an acetoin dehydrogenase (TPP-dependent) alpha chain.

### EXAMPLE 512

[0966] A DNA sequence was identified in S. pyogenes <SEQ ID 1023>. The sequence encodes the amino acid sequence <SEQ ID 1024>, which is related to SEQ ID 4254 of WO02/34771. The encoded polypeptide is a uDP-N-acetylmuramyl tripeptide synthetase.

### EXAMPLE 513

[0967] A DNA sequence was identified in S. pyogenes <SEQ ID 1025>. The sequence encodes the amino acid sequence <SEQ ID 1026>, which is related to SEQ ID 4228 of WO02/34771. The encoded polypeptide is a coproporphyrinogen III oxidase.

### EXAMPLE 514

[0968] A DNA sequence was identified in S. pyogenes <SEQ ID 1027>. The sequence encodes the amino acid sequence <SEQ ID 1028>, which is related to SEQ ID 4200 of WO02/34771.

### EXAMPLE 515

[0969] A DNA sequence was identified in S. pyogenes <SEQ ID 1029>. The sequence encodes the amino acid sequence <SEQ ID 1030>, which is related to SEQ ID 1636 of WO02/34771. The encoded polypeptide is a phospotransferase system (PTS), enzyme 11, component C.

### EXAMPLE 516

[0970] A DNA sequence was identified in S. pyogenes <SEQ ID 1031>. The sequence encodes the amino acid sequence <SEQ ID 1032>, which is related to SEQ ID 1618 of WO02/34771. The encoded polypeptide is a periplasmic-iron-binding protein.

### EXAMPLE 517

[0971] A DNA sequence was identified in S. pyogenes <SEQ ID 1033>. The sequence encodes the amino acid sequence <SEQ ID 1034>, which is related to SEQ ID 5366 of WO02/34771. The encoded polypeptide is a succinic semialdehyde dehydrogenase.

### EXAMPLE 518

[0972] A DNA sequence was identified in S. pyogenes <SEQ ID 1035>. The sequence encodes the amino acid sequence <SEQ ID 1036>, which is related to SEQ ID 2588 of WO02/34771. The encoded polypeptide is a dipeptidase.

### EXAMPLE 519

[0973] A DNA sequence was identified in S. pyogenes <SEQ ID 1037>. The sequence encodes the amino acid sequence <SEQ ID 1038>, which is related to SEQ ID 5918 of WO02/34771. The encoded polypeptide is a 50S ribosomal protein L10.

### EXAMPLE 520

[0974] A DNA sequence was identified in S. pyogenes <SEQ ID 1039>. The sequence encodes the amino acid sequence <SEQ ID 1040>, which is related to SEQ ID 5914 of WO02/34771. The encoded polypeptide is a 50S ribosomal protein L7/L12.

### EXAMPLE 521

[0975] A DNA sequence was identified in S. pyogenes <SEQ ID 1041>. The sequence encodes the amino acid sequence <SEQ ID 1042>, which is related to SEQ ID 2436 of WO02/34771. The encoded polypeptide is a methyl transferase.

### EXAMPLE 522

[0976] A DNA sequence was identified in S. pyogenes <SEQ ID 1043>. The sequence encodes the amino acid sequence <SEQ ID 1044>, which is related to SEQ ID 1832 of WO02/34771. The encoded polypeptide is an ABC transporter (ATP-binding)—lantibiotic associated.

### EXAMPLE 523

[0977] A DNA sequence was identified in S. pyogenes <SEQ ID 1045>. The sequence encodes the amino acid sequence <SEQ ID 1046>, which is related to SEQ ID 5342 of WO02/34771. The encoded polypeptide is a folyl-polyglutamate synthetase.

### EXAMPLE 524

[0978] A DNA sequence was identified in S. pyogenes <SEQ ID 1047>. The sequence encodes the amino acid sequence <SEQ ID 1048>, which is related to SEQ ID 5316 of WO02/34771. The encoded polypeptide is a spermidine/putrescine ABC transporter (permease protein).

### EXAMPLE 525

[0979] A DNA sequence was identified in S. pyogenes <SEQ ID 1049>. The sequence encodes the amino acid sequence <SEQ ID 1050>, which is related to SEQ ID 5304 of WO02/34771.

### EXAMPLE 526

[0980] A DNA sequence was identified in S. pyogenes <SEQ ID 1051>. The sequence encodes the amino acid sequence <SEQ ID 1052>, which is related to SEQ ID 5252 of WO02/34771.

### EXAMPLE 527

[0981] A DNA sequence was identified in S. pyogenes <SEQ ID 1053>. The sequence encodes the amino acid sequence <SEQ ID 1054>, which is related to SEQ ID 636 of WO02/34771. The encoded polypeptide is an ABC transporter (binding protein).

### EXAMPLE 528

[0982] A DNA sequence was identified in S. pyogenes <SEQ ID 1055>. The sequence encodes the amino acid sequence <SEQ ID 1056>, which is related to SEQ ID 6618 of WO02/34771. The encoded polypeptide is a GMP reductase.

### EXAMPLE 529

[0983] A DNA sequence was identified in S. pyogenes <SEQ ID 1057>. The sequence encodes the amino acid sequence <SEQ ID 1058>, which is related to SEQ ID 6566 of WO02/34771.

### EXAMPLE 530

[0984] A DNA sequence was identified in S. pyogenes <SEQ ID 1059>. The sequence encodes the amino acid sequence <SEQ ID 1060>, which is related to SEQ ID 6562 of WO02/34771. The encoded polypeptide is a serine hydroxymethyltransferase.

### EXAMPLE 531

[0985] A DNA sequence was identified in S. pyogenes <SEQ ID 1061>. The sequence encodes the amino acid sequence <SEQ ID 1062>, which is related to SEQ ID 4650 of WO02/34771.

### EXAMPLE 532

[0986] A DNA sequence was identified in S. pyogenes <SEQ ID 1063>. The sequence encodes the amino acid sequence <SEQ ID 1064>, which is related to SEQ ID 7920 of WO02/34771.

### EXAMPLE 533

[0987] A DNA sequence was identified in S. pyogenes <SEQ ID 1065>. The sequence encodes the amino acid sequence <SEQ ID 1066>, which is related to SEQ ID 124 of WO02/34771. The encoded polypeptide is a D-specific D-2-hydroxyacid dehydrogenase.

### EXAMPLE 534

[0988] A DNA sequence was identified in S. pyogenes <SEQ ID 1067>. The sequence encodes the amino acid sequence <SEQ ID 1068>, which is related to SEQ ID 7936 of WO02/34771. The encoded polypeptide is a Mg2+/citrate complex transporter.

### EXAMPLE 535

[0989] A DNA sequence was identified in S. pyogenes <SEQ ID 1069>. The sequence encodes the amino acid sequence <SEQ ID 1070>, which is related to SEQ ID 7952 of WO02/34771.

### EXAMPLE 536

[0990] A DNA sequence was identified in S. pyogenes <SEQ ID 1071>. The sequence encodes the amino acid sequence <SEQ ID 1072>, which is related to SEQ ID 7954 of WO02/34771. The encoded polypeptide is an oxaloacetate decarboxylase alpha chain.

### EXAMPLE 537

[0991] A DNA sequence was identified in S. pyogenes <SEQ ID 1073>. The sequence encodes the amino acid sequence <SEQ ID 1074>, which is related to SEQ ID 6516 of WO02/34771. The encoded polypeptide is a repressor protein.

### EXAMPLE 538

[0992] A DNA sequence was identified in S. pyogenes <SEQ ID 1075>. The sequence encodes the amino acid sequence <SEQ ID 1076>, which is related to SEQ ID 2090 of WO02/34771. The encoded polypeptide is a signal recognition particle.

### EXAMPLE 539

[0993] A DNA sequence was identified in S. pyogenes <SEQ ID 1077>. The sequence encodes the amino acid sequence <SEQ ID 1078>, which is related to SEQ ID 2052 of WO02/34771. The encoded polypeptide is an ABC transporter (ATP-binding protein).

### EXAMPLE 540

[0994] A DNA sequence was identified in S. pyogenes <SEQ ID 1079>. The sequence encodes the amino acid sequence <SEQ ID 1080>, which is related to SEQ ID 6168 of WO02/34771. The encoded polypeptide is a flavoprotein.

### EXAMPLE 541

[0995] A DNA sequence was identified in S. pyogenes <SEQ ID 1081>. The sequence encodes the amino acid sequence <SEQ ID 1082>, which is related to SEQ ID 6160 of WO02/34771.

### EXAMPLE 542

[0996] A DNA sequence was identified in S. pyogenes <SEQ ID 1083>. The sequence encodes the amino acid sequence <SEQ ID 1084>, which is related to SEQ ID 4672 of WO02/34771. The encoded polypeptide is a sugar ABC transporter (permease protein).

### EXAMPLE 543

[0997] A DNA sequence was identified in S. pyogenes <SEQ ID 1085>. The sequence encodes the amino acid sequence <SEQ ID 1086>, which is related to SEQ ID 4678 of WO02/34771. The encoded polypeptide is a sugar ABC transporter (ATP-binding protein).

### EXAMPLE 544

[0998] A DNA sequence was identified in S. pyogenes <SEQ ID 1087>. The sequence encodes the amino acid sequence <SEQ ID 1088>, which is related to SEQ ID 4688 of WO02/34771.

### EXAMPLE 545

[0999] A DNA sequence was identified in S. pyogenes <SEQ ID 1089>. The sequence encodes the amino acid sequence <SEQ ID 1090>, which is related to SEQ ID 2074 of WO02/34771. The encoded polypeptide is a lysyl-aminopeptidase; aminopeptidase N.

### EXAMPLE 546

[1000] A DNA sequence was identified in S. pyogenes <SEQ ID 1091>. The sequence encodes the amino acid sequence <SEQ ID 1092>, which is related to SEQ ID 5828 of WO02/34771.

### EXAMPLE 547

[1001] A DNA sequence was identified in S. pyogenes <SEQ ID 1093>. The sequence encodes the amino acid sequence <SEQ ID 1094>, which is related to SEQ ID 1354 of WO02/34771. The encoded polypeptide is an ABC transporter (ATP-binding protein).

### EXAMPLE 548

[1002] A DNA sequence was identified in S. pyogenes <SEQ ID 1095>. The sequence encodes the amino acid sequence <SEQ ID 1096>, which is related to SEQ ID 5082 of WO02/34771. The encoded polypeptide is a maltose operon transcriptional repressor.

### EXAMPLE 549

[1003] A DNA sequence was identified in S. pyogenes <SEQ ID 1097>. The sequence encodes the amino acid sequence <SEQ ID 1098>, which is related to SEQ ID 310 herein. The encoded polypeptide is a cyclomaltodextrinase.

### EXAMPLE 550

[1004] A DNA sequence was identified in S. pyogenes <SEQ ID 1099>. The sequence encodes the amino acid sequence <SEQ ID 1100>, which is related to SEQ ID 314 herein. The encoded polypeptide is a beta-glucosidase.

### EXAMPLE 551

[1005] A DNA sequence was identified in S. pyogenes <SEQ ID 1101>. The sequence encodes the amino acid sequence <SEQ ID 1102>, which is related to SEQ ID 7996 of WO02/34771.

### EXAMPLE 552

[1006] A DNA sequence was identified in S. pyogenes <SEQ ID 1103>. The sequence encodes the amino acid sequence <SEQ ID 1104>, which is related to SEQ ID 4032 of WO02/34771.

### EXAMPLE 553

[1007] A DNA sequence was identified in S. pyogenes <SEQ ID 1105>. The sequence encodes the amino acid sequence <SEQ ID 1106>, which is related to SEQ ID 4394 of WO02/34771.

### EXAMPLE 554

[1008] A DNA sequence was identified in S. pyogenes <SEQ ID 1107>. The sequence encodes the amino acid sequence <SEQ ID 1108>, which is related to SEQ ID 4454 of WO02/34771. The encoded polypeptide is a RNA helicase.

### EXAMPLE 555

[1009] A DNA sequence was identified in S. pyogenes <SEQ ID 1109>. The sequence encodes the amino acid sequence <SEQ ID 1110>, which is related to SEQ ID 4476 of WO02/34771. The encoded polypeptide is a glutaredoxin.

### EXAMPLE 556

[1010] A DNA sequence was identified in S. pyogenes <SEQ ID 1111>. The sequence encodes the amino acid sequence <SEQ ID 1112>, which is related to SEQ ID 412 of WO02/34771. The encoded polypeptide is a transcriptional regulator protein.

### EXAMPLE 557

[1011] A DNA sequence was identified in S. pyogenes <SEQ ID 1113>. The sequence encodes the amino acid sequence <SEQ ID 1114>, which is related to SEQ ID 6602 of WO02/34771. The encoded polypeptide is a formate dehydrogenase.

### EXAMPLE 558

[1012] A DNA sequence was identified in S. pyogenes <SEQ ID 1115>. The sequence encodes the amino acid sequence <SEQ ID 1116>, which is related to SEQ ID 5456 of WO02/34771. The encoded polypeptide is a dihydroorotate dehydrogenase.

### EXAMPLE 559

[1013] A DNA sequence was identified in S. pyogenes <SEQ ID 1117>. The sequence encodes the amino acid sequence <SEQ ID 1118>, which is related to SEQ ID 8036 of WO02/34771.

### EXAMPLE 560

[1014] A DNA sequence was identified in S. pyogenes <SEQ ID 1119>. The sequence encodes the amino acid sequence <SEQ ID 1120>, which is related to SEQ ID 1420 of WO02/34771. The encoded polypeptide is a structural protein—phage associated.

### EXAMPLE 561

[1015] A DNA sequence was identified in S. pyogenes <SEQ ID 1121>. The sequence encodes the amino acid sequence <SEQ ID 1122>, which is related to SEQ ID 1444 of WO02/34771. The encoded polypeptide may be phage-associated.

### EXAMPLE 562

[1016] A DNA sequence was identified in S. pyogenes <SEQ ID 1123>. The sequence encodes the amino acid sequence <SEQ ID 1124>, which is related to SEQ ID 8058 of WO02/34771. The encoded polypeptide may be phage-associated.

### EXAMPLE 563

[1017] A DNA sequence was identified in S. pyogenes <SEQ ID 1125>. The sequence encodes the amino acid sequence <SEQ ID 1126>, which is related to SEQ ID 1546 of WO02/34771. The encoded polypeptide is a repressor—phage associated.

### EXAMPLE 564

[1018] A DNA sequence was identified in S. pyogenes <SEQ ID 1127>. The sequence encodes the amino acid sequence <SEQ ID 1128>, which is related to SEQ ID 302 of WO02/34771.

### EXAMPLE 565

[1019] A DNA sequence was identified in S. pyogenes <SEQ ID 1129>. The sequence encodes the amino acid sequence <SEQ ID 1130>, which is related to SEQ ID 298 of WO02/34771. The encoded polypeptide is a DNA repair and genetic recombination protein.

### EXAMPLE 566

[1020] A DNA sequence was identified in S. pyogenes <SEQ ID 1131>. The sequence encodes the amino acid sequence <SEQ ID 1132>, which is related to SEQ ID 292 of WO02/34771. The encoded polypeptide is a repressor protein.

### EXAMPLE 567

[1021] A DNA sequence was identified in S. pyogenes <SEQ ID 1133>. The sequence encodes the amino acid sequence <SEQ ID 1134>, which is related to SEQ ID 276 of WO02/34771. The encoded polypeptide is an exodeoxyribonuclease VII (large subunit).

### EXAMPLE 568

[1022] A DNA sequence was identified in S. pyogenes <SEQ ID 1135>. The sequence encodes the amino acid sequence <SEQ ID 1136>, which is related to SEQ ID 270 of WO02/34771. The encoded polypeptide is a bifunctional methylenetetrahydrofolate dehydrogenase/methenyltetrahydrofolate cyclohydrolase.

### EXAMPLE 569

[1023] A DNA sequence was identified in S. pyogenes <SEQ ID 1137>. The sequence encodes the amino acid sequence <SEQ ID 1138>, which is related to SEQ ID 266 of WO02/34771. The encoded polypeptide is a phosphomannomutase.

### EXAMPLE 570

[1024] A DNA sequence was identified in S. pyogenes <SEQ ID 1139>. The sequence encodes the amino acid sequence <SEQ ID 1140>, which is related to SEQ ID 8092 of WO02/34771. The encoded polypeptide is a deoxyribodipyrimidine photolyase.

### EXAMPLE 571

[1025] A DNA sequence was identified in S. pyogenes <SEQ ID 1141>. The sequence encodes the amino acid sequence <SEQ ID 1142>, which is related to SEQ ID 1186 of WO02/34771. The encoded polypeptide is an amino acid ABC transporter (ATP-binding protein).

### EXAMPLE 572

[1026] A DNA sequence was identified in S. pyogenes <SEQ ID 1143>. The sequence encodes the amino acid sequence <SEQ ID 1144>, which is related to SEQ ID 234 of WO02/34771.

### EXAMPLE 573

[1027] A DNA sequence was identified in S. pyogenes <SEQ ID 1145>. The sequence encodes the amino acid sequence <SEQ ID 1146>, which is related to SEQ ID 222 of WO02/34771. The encoded polypeptide is a cell division protein.

### EXAMPLE 574

[1028] A DNA sequence was identified in S. pyogenes <SEQ ID 1147>. The sequence encodes the amino acid sequence <SEQ ID 1148>, which is related to SEQ ID 194 of WO02/34771.

### EXAMPLE 575

[1029] A DNA sequence was identified in S. pyogenes <SEQ ID 1149>. The sequence encodes the amino acid sequence <SEQ ID 1150>, which is related to SEQ ID 6492 of WO02/34771. The encoded polypeptide is a ribose transport operon repressor.

### EXAMPLE 576

[1030] A DNA sequence was identified in S. pyogenes <SEQ ID 1151>. The sequence encodes the amino acid sequence <SEQ ID 1152>, which is related to SEQ ID 8124 of WO02/34771.

### EXAMPLE 577

[1031] A DNA sequence was identified in S. pyogenes <SEQ ID 1153>. The sequence encodes the amino acid sequence <SEQ ID 1154>, which is related to SEQ ID 728 of WO02/34771.

### EXAMPLE 578

[1032] A DNA sequence was identified in S. pyogenes <SEQ ID 1155>. The sequence encodes the amino acid sequence <SEQ ID 1156>, which is related to SEQ ID 9068 of WO02/34771. The encoded polypeptide is a transposase—IS1548.

### EXAMPLE 579

[1033] A DNA sequence was identified in S. pyogenes <SEQ ID 1157>. The sequence encodes the amino acid sequence <SEQ ID 1158>, which is related to SEQ ID 1034 of WO02/34771.

### EXAMPLE 580

[1034] A DNA sequence was identified in S. pyogenes <SEQ ID 1159>. The sequence encodes the amino acid sequence <SEQ ID 1160>, which is related to SEQ ID 5298 of WO02/34771. The encoded polypeptide is a two-component sensor response regulator.

### EXAMPLE 581

[1035] A DNA sequence was identified in S. pyogenes <SEQ ID 1161>. The sequence encodes the amino acid sequence <SEQ ID 1162>, which is related to SEQ ID 1964 of WO02/34771. The encoded polypeptide is a two-component sensor histidine kinase.

### EXAMPLE 582

[1036] A DNA sequence was identified in S. pyogenes <SEQ ID 1163>. The sequence encodes the amino acid sequence <SEQ ID 1164>, which is related to SEQ ID 8152 of WO02/34771. The encoded polypeptide is a hyaluronidase.

### EXAMPLE 583

[1037] A DNA sequence was identified in S. pyogenes <SEQ ID 1165>. The sequence encodes the amino acid sequence <SEQ ID 1166>, which is related to SEQ ID 2996 of WO02/34771. The encoded polypeptide is a two-component response regulator.

### EXAMPLE 584

[1038] A DNA sequence was identified in S. pyogenes <SEQ ID 1167>. The sequence encodes the amino acid sequence <SEQ ID 1168>, which is related to SEQ ID 3010 of WO02/34771. The encoded polypeptide is a primosomal replication factor Y.

### EXAMPLE 585

[1039] A DNA sequence was identified in S. pyogenes <SEQ ID 1169>. The sequence encodes the amino acid sequence <SEQ ID 1170>, which is related to SEQ ID 3006 of WO02/34771.

### EXAMPLE 586

[1040] A DNA sequence was identified in S. pyogenes <SEQ ID 1171>. The sequence encodes the amino acid sequence <SEQ ID 1172>, which is related to SEQ ID 8172 of WO02/34771. The encoded polypeptide is an acetyl-CoA:acetoacetyl-CoA transferase A subunit.

### EXAMPLE 587

[1041] A DNA sequence was identified in S. pyogenes <SEQ ID 1173>. The sequence encodes the amino acid sequence <SEQ ID 1174>, which is related to SEQ ID 2942 of WO02/34771. The encoded polypeptide is a NAD+ synthase.

### EXAMPLE 588

[1042] A DNA sequence was identified in S. pyogenes <SEQ ID 1175>. The sequence encodes the amino acid sequence <SEQ ID 1176>, which is related to SEQ ID 4070 of WO02/34771. The encoded polypeptide is an amino acid permease.

### EXAMPLE 589

[1043] A DNA sequence was identified in S. pyogenes <SEQ ID 1177>. The sequence encodes the amino acid sequence <SEQ ID 1178>, which is related to SEQ ID 2930 of WO02/34771. The encoded polypeptide is an amino acid ABC transport system (ATP-binding protein).

### EXAMPLE 590

[1044] A DNA sequence was identified in S. pyogenes <SEQ ID 1179>. The sequence encodes the amino acid sequence <SEQ ID 1180>, which is related to SEQ ID 2912 of WO02/34771. The encoded polypeptide is an undecaprenyl-phosphate-UDP-MurNAc-pentapeptide phospho-MurNAc-pentapeptide transferase.

### EXAMPLE 591

[1045] A DNA sequence was identified in S. pyogenes <SEQ ID 1181>. The sequence encodes the amino acid sequence <SEQ ID 1182>, which is related to SEQ ID 2900 of WO02/34771. The encoded polypeptide is a cell division protein.

### EXAMPLE 592

[1046] A DNA sequence was identified in S. pyogenes <SEQ ID 1183>. The sequence encodes the amino acid sequence <SEQ ID 1184>, which is related to SEQ ID 2888 of WO02/34771. The encoded polypeptide is a gamma-glutamyl kinase.

### EXAMPLE 593

[1047] A DNA sequence was identified in S. pyogenes <SEQ ID 1185>. The sequence encodes the amino acid sequence <SEQ ID 1186>, which is related to SEQ ID 2866 of WO02/34771. The encoded polypeptide is a transcriptional regulatory protein.

### EXAMPLE 594

[1048] A DNA sequence was identified in S. pyogenes <SEQ ID 1187>. The sequence encodes the amino acid sequence <SEQ ID 1188>, which is related to SEQ ID 8194 of WO02/34771.

### EXAMPLE 595

[1049] A DNA sequence was identified in S. pyogenes <SEQ ID 1189>. The sequence encodes the amino acid sequence <SEQ ID 1190>, which is related to SEQ ID 780 of WO02/34771. The encoded polypeptide is a reductase/dehydrogenase.

### EXAMPLE 596

[1050] A DNA sequence was identified in S. pyogenes <SEQ ID 1191>. The sequence encodes the amino acid sequence <SEQ ID 1192>, which is related to SEQ ID 320 herein. The encoded polypeptide is a transcription regulator.

### EXAMPLE 597

[1051] A DNA sequence was identified in S. pyogenes <SEQ ID 1193>. The sequence encodes the amino acid sequence <SEQ ID 1194>, which is related to SEQ ID 3518 of WO02/34771.

### EXAMPLE 598

[1052] A DNA sequence was identified in S. pyogenes <SEQ ID 1195>. The sequence encodes the amino acid sequence <SEQ ID 1196>, which is related to SEQ ID 3514 of WO02/34771.

### EXAMPLE 599

[1053] A DNA sequence was identified in S. pyogenes <SEQ ID 1197>. The sequence encodes the amino acid sequence <SEQ ID 1198>, which is related to SEQ ID 6916 of WO02/34771. The encoded polypeptide is a galactose-6-phosphate isomerase.

### EXAMPLE 600

[1054] A DNA sequence was identified in S. pyogenes <SEQ ID 1199>. The sequence encodes the amino acid sequence <SEQ ID 1200>, which is related to SEQ ID 1574 of WO02/34771. The encoded polypeptide is a PTS system, enzyme IIC component.

### EXAMPLE 601

[1055] A DNA sequence was identified in S. pyogenes <SEQ ID 1201>. The sequence encodes the amino acid sequence <SEQ ID 1202>, which is related to SEQ ID 3506 of WO02/34771. The encoded polypeptide is a cation-transporting ATP-ase—copper transport operon.

### EXAMPLE 602

[1056] A DNA sequence was identified in S. pyogenes <SEQ ID 1203>. The sequence encodes the amino acid sequence <SEQ ID 1204>, which is related to SEQ ID 3502 of WO02/34771. The encoded polypeptide is a negative transcriptional regulator—cpooer transport operon.

### EXAMPLE 603

[1057] A DNA sequence was identified in S. pyogenes <SEQ ID 1205>. The sequence encodes the amino acid sequence <SEQ ID 1206>, which is related to SEQ ID 3482 of WO02/34771.

### EXAMPLE 604

[1058] A DNA sequence was identified in S. pyogenes <SEQ ID 1207>. The sequence encodes the amino acid sequence <SEQ ID 1208>, which is related to SEQ ID 3478 of WO02/34771. The encoded polypeptide is a transcription termination-antitermination factor.

### EXAMPLE 605

[1059] A DNA sequence was identified in S. pyogenes <SEQ ID 1209>. The sequence encodes the amino acid sequence <SEQ ID 1210>, which is related to SEQ ID 3474 of WO02/34771.

### EXAMPLE 606

[1060] A DNA sequence was identified in S. pyogenes <SEQ ID 1211>. The sequence encodes the amino acid sequence <SEQ ID 1212>, which is related to SEQ ID 5212 of WO02/34771. The encoded polypeptide is an acetyl-CoA carboxylase biotin carboxylase subunit.

### EXAMPLE 607

[1061] A DNA sequence was identified in S. pyogenes <SEQ ID 1213>. The sequence encodes the amino acid sequence <SEQ ID 1214>, which is related to SEQ ID 5208 of WO02/34771. The encoded polypeptide is a beta-hydroxyacyl-ACP dehydratase.

### EXAMPLE 608

[1062] A DNA sequence was identified in S. pyogenes <SEQ ID 1215>. The sequence encodes the amino acid sequence <SEQ ID 1216>, which is related to SEQ ID 5196 of WO02/34771. The encoded polypeptide is a malonyl CoA-acyl carrier protein transacylase.

### EXAMPLE 609

[1063] A DNA sequence was identified in S. pyogenes <SEQ ID 1217>. The sequence encodes the amino acid sequence <SEQ ID 1218>, which is related to SEQ ID 6882 of WO02/34771. The encoded polypeptide is a heat-shock (chaperone) protein.

### EXAMPLE 610

[1064] A DNA sequence was identified in S. pyogenes <SEQ ID 1219>. The sequence encodes the amino acid sequence <SEQ ID 1220>, which is related to SEQ ID 9234 of WO02/34771.

### EXAMPLE 611

[1065] A DNA sequence was identified in S. pyogenes <SEQ ID 1221>. The sequence encodes the amino acid sequence <SEQ ID 1222>, which is related to SEQ ID 5576 of WO02/34771. The encoded polypeptide is a Glu-tRNA Gln amidotransferase subunit C.

### EXAMPLE 612

[1066] A DNA sequence was identified in S. pyogenes <SEQ ID 1223>. The sequence encodes the amino acid sequence <SEQ ID 1224>, which is related to SEQ ID 5562 of WO02/34771. The encoded polypeptide is a pyrazinamidase/nicotinamidase.

### EXAMPLE 613

[1067] A DNA sequence was identified in S. pyogenes <SEQ ID 1225>. The sequence encodes the amino acid sequence <SEQ ID 1226>, which is related to SEQ ID 3662 of WO02/34771. The encoded polypeptide is an aminotransferase.

### EXAMPLE 614

[1068] A DNA sequence was identified in S. pyogenes <SEQ ID 1227>. The sequence encodes the amino acid sequence <SEQ ID 1228>, which is related to SEQ ID 3658 of WO02/34771.

### EXAMPLE 615

[1069] A DNA sequence was identified in S. pyogenes <SEQ ID 1229>. The sequence encodes the amino acid sequence <SEQ ID 1230>, which is related to SEQ ID 4416 of WO02/34771. The encoded polypeptide is an ABC transporter (ATP-binding protein).

### EXAMPLE 616

[1070] A DNA sequence was identified in S. pyogenes <SEQ ID 1231>. The sequence encodes the amino acid sequence <SEQ ID 1232>, which is related to SEQ ID 8228 of WO02/34771. The encoded polypeptide shares similarity with several eukaryotic proteins.

### EXAMPLE 617

[1071] A DNA sequence was identified in S. pyogenes <SEQ ID 1233>. The sequence encodes the amino acid sequence <SEQ ID 1234>, which is related to SEQ ID 346 herein.

### EXAMPLE 618

[1072] A DNA sequence was identified in S. pyogenes <SEQ ID 1235>. The sequence encodes the amino acid sequence <SEQ ID 1236>, which is related to SEQ ID 3602 of WO02/34771. The encoded polypeptide is a sucrose-6-phosphate hydrolase.

### EXAMPLE 619

[1073] A DNA sequence was identified in S. pyogenes <SEQ ID 1237>. The sequence encodes the amino acid sequence <SEQ ID 1238>, which is related to SEQ ID 3594 of WO02/34771. The encoded polypeptide is a transcriptional terminator.

### EXAMPLE 620

[1074] A DNA sequence was identified in S. pyogenes <SEQ ID 1239>. The sequence encodes the amino acid sequence <SEQ ID 1240>, which is related to SEQ ID 3574 of WO02/34771. The encoded polypeptide is a late competence protein required for DNA binding.

### EXAMPLE 621

[1075] A DNA sequence was identified in S. pyogenes <SEQ ID 1241>. The sequence encodes the amino acid sequence <SEQ ID 1242>, which is related to SEQ ID 3568 of WO02/34771. The encoded polypeptide is an aminopeptidase P; XAA-pro aminopeptidase.

### EXAMPLE 622

[1076] A DNA sequence was identified in S. pyogenes <SEQ ID 1243>. The sequence encodes the amino acid sequence <SEQ ID 1244>, which is related to SEQ ID 3560 of WO02/34771. The encoded polypeptide is an excinuclease ABC (subunit A).

### EXAMPLE 623

[1077] A DNA sequence was identified in S. pyogenes <SEQ ID 1245>. The sequence encodes the amino acid sequence <SEQ ID 1246>, which is related to SEQ ID 5066 of WO02/34771. The encoded polypeptide is an a/G-specific adenine glycosylase.

### EXAMPLE 624

[1078] A DNA sequence was identified in S. pyogenes <SEQ ID 1247>. The sequence encodes the amino acid sequence <SEQ ID 1248>, which is related to SEQ ID 1740 of WO02/34771.

### EXAMPLE 625

[1079] A DNA sequence was identified in S. pyogenes <SEQ ID 1249>. The sequence encodes the amino acid sequence <SEQ ID 1250>, which is related to SEQ ID 5056 of WO02/34771. The encoded polypeptide is a DNA mismatch repair protein.

### EXAMPLE 626

[1080] A DNA sequence was identified in S. pyogenes <SEQ ID 1251>. The sequence encodes the amino acid sequence <SEQ ID 1252>, which is related to SEQ ID 5024 of WO02/34771. The encoded polypeptide is a pyruvate formate-lyase.

### EXAMPLE 627

[1081] A DNA sequence was identified in S. pyogenes <SEQ ID 1253>. The sequence encodes the amino acid sequence <SEQ ID 1254>, which is related to SEQ ID 9178 of WO02/34771.

### EXAMPLE 628

[1082] A DNA sequence was identified in S. pyogenes <SEQ ID 1255>. The sequence encodes the amino acid sequence <SEQ ID 1256>, which is related to SEQ ID 5000 of WO02/34771. The encoded polypeptide is an antibiotic resistance protein NorA.

### EXAMPLE 629

[1083] A DNA sequence was identified in S. pyogenes <SEQ ID 1257>. The sequence encodes the amino acid sequence <SEQ ID 1258>, which is related to SEQ ID 1712 of WO02/34771. The encoded polypeptide is a transcriptional activator regulator protein.

### EXAMPLE 630

[1084] A DNA sequence was identified in S. pyogenes <SEQ ID 1259>. The sequence encodes the amino acid sequence <SEQ ID 1260>, which is related to SEQ ID 6246 of WO02/34771. The encoded polypeptide is a nucleoside transporter.

### EXAMPLE 631

[1085] A DNA sequence was identified in S. pyogenes <SEQ ID 1261>. The sequence encodes the amino acid sequence <SEQ ID 1262>, which is related to SEQ ID 4922 of WO02/34771. The encoded polypeptide is a ribosomal-protein-alanine acetyltransferase.

### EXAMPLE 632

[1086] A DNA sequence was identified in S. pyogenes <SEQ ID 1263>. The sequence encodes the amino acid sequence <SEQ ID 1264>, which is related to SEQ ID 6908 of WO02/34771. The encoded polypeptide is a transcription regulator—(trigger factor (prolyl isomerase)).

### EXAMPLE 633

[1087] A DNA sequence was identified in S. pyogenes <SEQ ID 1265>. The sequence encodes the amino acid sequence <SEQ ID 1266>, which is related to SEQ ID 6680 of WO02/34771.

### EXAMPLE 634

[1088] A DNA sequence was identified in S. pyogenes <SEQ ID 1267>. The sequence encodes the amino acid sequence <SEQ ID 1268>, which is related to SEQ ID 324 herein. The encoded polypeptide is a phospho-beta-D-galactosidase.

### EXAMPLE 635

[1089] A DNA sequence was identified in S. pyogenes <SEQ ID 1269>. The sequence encodes the amino acid sequence <SEQ ID 1270>, which is related to SEQ ID 570 of WO02/34771. The encoded polypeptide is a 50S ribosomal protein L13.

### EXAMPLE 636

[1090] A DNA sequence was identified in S. pyogenes <SEQ ID 1271>. The sequence encodes the amino acid sequence <SEQ ID 1272>, which is related to SEQ ID 556 of WO02/34771. The encoded polypeptide is a tRNA/rRNA methyltransferase.

### EXAMPLE 637

[1091] A DNA sequence was identified in S. pyogenes <SEQ ID 1273>. The sequence encodes the amino acid sequence <SEQ ID 1274>, which is related to SEQ ID S10 of WO02/34771.

### EXAMPLE 638

[1092] A DNA sequence was identified in S. pyogenes <SEQ ID 1275>. The sequence encodes the amino acid sequence <SEQ ID 1276>, which is related to SEQ ID 496 of WO02/34771.

### EXAMPLE 639

[1093] A DNA sequence was identified in S. pyogenes <SEQ ID 1277>. The sequence encodes the amino acid sequence <SEQ ID 1278>, which is related to SEQ ID 2318 of WO02/34771. The encoded polypeptide is a transcriptional regulator (MarR family).

### EXAMPLE 640

[1094] A DNA sequence was identified in S. pyogenes <SEQ ID 1279>. The sequence encodes the amino acid sequence <SEQ ID 1280>, which is related to SEQ ID 6930 of WO02/34771. The encoded polypeptide is a leucine-rich protein.

### EXAMPLE 641

[1095] A DNA sequence was identified in S. pyogenes <SEQ ID 1281>. The sequence encodes the amino acid sequence <SEQ ID 1282>, which is related to SEQ ID 1720 of WO02/34771.

### EXAMPLE 642

[1096] A DNA sequence was identified in S. pyogenes <SEQ ID 1283>. The sequence encodes the amino acid sequence <SEQ ID 1284>, which is related to SEQ ID 28. of WO02/34771. The encoded polypeptide is a para-aminobenzoate synthetase.

### EXAMPLE 643

[1097] A DNA sequence was identified in S. pyogenes <SEQ ID 1285>. The sequence encodes the amino acid sequence <SEQ ID 1286>, which is related to SEQ ID 8302 of WO02/34771. The encoded polypeptide is a pai1 protein (theoretical repressor).

### EXAMPLE 644

[1098] A DNA sequence was identified in S. pyogenes <SEQ ID 1287>. The sequence encodes the amino acid sequence <SEQ ID 1288>, which is related to SEQ ID 8306 of WO02/34771. The encoded polypeptide is a mitogenic exotoxin Z.

### EXAMPLE 645

[1099] A DNA sequence was identified in S. pyogenes <SEQ ID 1289>. The sequence encodes the amino acid sequence <SEQ ID 1290>, which is related to SEQ ID 9194 of WO02/34771.

### EXAMPLE 646

[1100] A DNA sequence was identified in S. pyogenes <SEQ ID 1291>. The sequence encodes the amino acid sequence <SEQ ID 1292>, which is related to SEQ ID 3064 of WO02/34771. The encoded polypeptide is a PTS system, enzyme IIB.

### EXAMPLE 647

[1101] A DNA sequence was identified in S. pyogenes <SEQ ID 1293>. The sequence encodes the amino acid sequence <SEQ ID 1294>, which is related to SEQ ID 3050 of WO02/34771. The encoded polypeptide is a transcriptional regulator.

### EXAMPLE 648

[1102] A DNA sequence was identified in S. pyogenes <SEQ ID 1295>. The sequence encodes the amino acid sequence <SEQ ID 1296>, which is related to SEQ ID 9196 of WO02/34771. The encoded polypeptide is a dipeptidase.

### EXAMPLE 649

[1103] A DNA sequence was identified in S. pyogenes <SEQ ID 1297>. The sequence encodes the amino acid sequence <SEQ ID 1298>, which is related to SEQ ID 6234 of WO02/34771. The encoded polypeptide is a heat shock protein (chaperonin).

### EXAMPLE 650

[1104] A DNA sequence was identified in S. pyogenes <SEQ ID 1299>. The sequence encodes the amino acid sequence <SEQ ID 1300>, which is related to SEQ ID 6230 of WO02/34771. The encoded polypeptide is a heat shock protein—cochaperonin.

### EXAMPLE 651

[1105] A DNA sequence was identified in S. pyogenes <SEQ ID 1301>. The sequence encodes the amino acid sequence <SEQ ID 1302>, which is related to SEQ ID 3326 of WO02/34771. The encoded polypeptide is a cold shock protein.

### EXAMPLE 652

[1106] A DNA sequence was identified in S. pyogenes <SEQ ID 1303>. The sequence encodes the amino acid sequence <SEQ ID 1304>, which is related to SEQ ID 8370 of WO02/34771.

### EXAMPLE 653

[1107] A DNA sequence was identified in S. pyogenes <SEQ ID 1305>. The sequence encodes the amino acid sequence <SEQ ID 1306>, which is related to SEQ ID 8372 of WO02/34771. The encoded polypeptide is a histidine ammonia-lyase.

### EXAMPLE 654

[1108] A DNA sequence was identified in S. pyogenes <SEQ ID 1307>. The sequence encodes the amino acid sequence <SEQ ID 1308>, which is related to SEQ ID 8374 of WO02/34771. The encoded polypeptide is a formiminoglutamate hydrolase.

### EXAMPLE 655

[1109] A DNA sequence was identified in S. pyogenes <SEQ ID 1309>. The sequence encodes the amino acid sequence <SEQ ID 1310>, which is related to SEQ ID 4526 of WO02/34771. The encoded polypeptide is an elongation factor TS.

### EXAMPLE 656

[1110] A DNA sequence was identified in S. pyogenes <SEQ ID 1310>. The sequence encodes the amino acid sequence <SEQ ID 1312>, which is related to SEQ ID 3396 of WO02/34771. The encoded polypeptide is an anaerobic ribonucleotide reductase activator.

### EXAMPLE 657

[1111] A DNA sequence was identified in S. pyogenes <SEQ ID 1313>. The sequence encodes the amino acid sequence <SEQ ID 1314>, which is related to SEQ ID 3388 of WO02/34771. The encoded polypeptide is an oxidoreductase.

### EXAMPLE 658

[1112] A DNA sequence was identified in S. pyogenes <SEQ ID 1315>. The sequence encodes the amino acid sequence <SEQ ID 1316>, which is related to SEQ D 3346 of WO02/34771. The encoded polypeptide is a 3-methyl-adenine DNA glycosylase 1, constitutive.

### EXAMPLE 659

[1113] A DNA sequence was identified in S. pyogenes <SEQ ID 1317>. The sequence encodes the amino acid sequence <SEQ ID 1318>, which is related to SEQ ID 3332 of WO02/34771. The encoded polypeptide is a DNA mismatch repair protein.

### EXAMPLE 660

[1114] A DNA sequence was identified in S. pyogenes <SEQ ID 1319>. The sequence encodes the amino acid sequence <SEQ ID 1320>, which is related to SEQ ID 578 of WO02/34771. The encoded polypeptide is an integrase—phage associated.

### EXAMPLE 661

[1115] A DNA sequence was identified in S. pyogenes <SEQ ID 1321>. The sequence encodes the amino acid sequence <SEQ ID 1322>, which is related to SEQ ID 8392 of WO02/34771.

### EXAMPLE 662

[1116] A DNA sequence was identified in S. pyogenes <SEQ ID 1323>. The sequence encodes the amino acid sequence <SEQ ID 1324>, which is related to SEQ ID 8396 of WO02/34771.

### EXAMPLE 663

[1117] A DNA sequence was identified in S. pyogenes <SEQ ID 1325>. The sequence encodes the amino acid sequence <SEQ ID 1326>, which is related to SEQ ID 8412 of WO02/34771.

### EXAMPLE 664

[1118] A DNA sequence was identified in S. pyogenes <SEQ ID 1327>. The sequence encodes the amino acid sequence <SEQ ID 1328>, which is related to SEQ ID 3310 of WO02/34771.

### EXAMPLE 665

[1119] A DNA sequence was identified in S. pyogenes <SEQ ID 1329>. The sequence encodes the amino acid sequence <SEQ ID 1330>, which is related to SEQ ID 3298 of WO02/34771. The encoded polypeptide is an aspartyl-tRNA synthetase.

### EXAMPLE 666

[1120] A DNA sequence was identified in S. pyogenes <SEQ ID 1331>. The sequence encodes the amino acid sequence <SEQ ID 1332>, which is related to SEQ ID 6152 of WO02/34771. The encoded polypeptide is a cadmium resistance protein.

### EXAMPLE 667

[1121] A DNA sequence was identified in S. pyogenes <SEQ ID 1333>. The sequence encodes the amino acid sequence <SEQ ID 1334>, which is related to SEQ ID 8432 of WO02/34771. The encoded polypeptide is a cadmium efflux system accessory.

### EXAMPLE 668

[1122] A DNA sequence was identified in S. pyogenes <SEQ ID 1335>. The sequence encodes the amino acid sequence <SEQ ID 1336>, which is related to SEQ ID 8442 of WO02/34771.

### EXAMPLE 669

[1123] A DNA sequence was identified in S. pyogenes <SEQ ID 1337>. The sequence encodes the amino acid sequence <SEQ ID 1338>, which is related to SEQ ID 330 herein. The encoded polypeptide is a transposase.

### EXAMPLE 670

[1124] A DNA sequence was identified in S. pyogenes <SEQ ID 1339>. The sequence encodes the amino acid sequence <SEQ ID 1340>, which is related to SEQ ID 3214 of WO02/34771.

### EXAMPLE 671

[1125] A DNA sequence was identified in S. pyogenes <SEQ ID 1341>. The sequence encodes the amino acid sequence <SEQ ID 1342>, which is related to SEQ ID 2424 of WO02/34771. The encoded polypeptide is a DNA polymerase III delta prime subunit.

### EXAMPLE 672

[1126] A DNA sequence was identified in S. pyogenes <SEQ ID 1343>. The sequence encodes the amino acid sequence <SEQ ID 1344>, which is related to SEQ ID 3194 of WO02/34771. The encoded polypeptide is a tRNA-(5-methylaminomethyl-2-thiouridylate).

### EXAMPLE 673

[1127] A DNA sequence was identified in S. pyogenes <SEQ ID 1345>. The sequence encodes the amino acid sequence <SEQ ID 1346>, which is related to SEQ ID 3152 of WO02/34771.

### EXAMPLE 674

[1128] A DNA sequence was identified in S. pyogenes <SEQ ID 1347>. The sequence encodes the amino acid sequence <SEQ ID 1348>, which is related to SEQ ID 3106 of WO02/34771. The encoded polypeptide is a tryptophanyl-tRNA synthetase.

### EXAMPLE 675

[1129] A DNA sequence was identified in S. agalactiae <SEQ ID 1349>. The sequence encodes the amino acid sequence <SEQ ID 1350>, which is related to SEQ ID 980 of WO02/34771. The encoded polypeptide is a phosphoribosylformylglycinamidine synthase.

### EXAMPLE 676

[1130] A DNA sequence was identified in S. agalactiae <SEQ ID 1351>. The sequence encodes the amino acid sequence <SEQ ID 1352>, which is related to SEQ ID 6842 of WO02/34771. The encoded polypeptide is a lipoprotein.

### EXAMPLE 677

[1131] A DNA sequence was identified in S. agalactiae <SEQ ID 1353>. The sequence encodes the amino acid sequence <SEQ ID 1354>, which is related to SEQ ID 8698 of WO02/34771. The encoded polypeptide is an ABC transporter/ATP-binding protein.

### EXAMPLE 678

[1132] A DNA sequence was identified in S. agalactiae <SEQ ID 1355>. The sequence encodes the amino acid sequence <SEQ ID 1356>, which is related to SEQ ID 124 herein.

### EXAMPLE 679

[1133] A DNA sequence was identified in S. agalactiae <SEQ ID 1357>. The sequence encodes the amino acid sequence <SEQ ID 1358>, which is related to SEQ ID 222 herein.

### EXAMPLE 680

[1134] A DNA sequence was identified in S. agalactiae <SEQ ID 1359>. The sequence encodes the amino acid sequence <SEQ ID 1360>, which is related to SEQ ID 5424 of WO02/34771.

### EXAMPLE 681

[1135] A DNA sequence was identified in S. agalactiae <SEQ ID 1361>. The sequence encodes the amino acid sequence <SEQ ID 1362>, which is related to SEQ ID 10570 of WO02/34771. The encoded polypeptide is a transposase (OrfA) of the IS3 family.

### EXAMPLE 682

[1136] A DNA sequence was identified in S. agalactiae <SEQ ID 1363>. The sequence encodes the amino acid sequence <SEQ ID 1364>, which is related to SEQ ID 5968 of WO02/34771. The encoded polypeptide is a hemolysin III.

### EXAMPLE 683

[1137] A DNA sequence was identified in S. agalactiae <SEQ ID 1365>. The sequence encodes the amino acid sequence <SEQ ID 1366>, which is related to SEQ ID 5588 of WO02/34771. The encoded polypeptide is a membrane protein.

### EXAMPLE 684

[1138] A DNA sequence was identified in S. agalactiae <SEQ ID 1367>. The sequence encodes the amino acid sequence <SEQ ID 1368>, which is related to SEQ ID 3656 of WO02/34771.

1. A protein comprising an amino acid sequence selected from the group consisting of SEQ IDs 2, 4, 6, 8, 10, 12, 14, 16, 18, 20, 22, 24, 26, 28, 30, 32, 34, 36, 38, 40, 42, 44, 46, 48, 50, 52, 54, 56, 58, 60, 62, 64, 66, 68, 70, 72, 74, 76, 78, 80, 82, 84, 86, 88, 90, 92, 94, 96, 98, 100, 102, 104, 106, 108, 110, 112, 114, 116, 118, 120, 122, 124, 126, 128, 130, 132, 134, 136, 138, 140, 142, 144, 146, 148, 150, 152, 154, 156, 158, 160, 162, 164, 166, 168, 170, 172, 174, 176, 178, 180, 182, 184, 186, 188, 190, 192, 194, 196, 198, 200, 202, 204, 206, 208, 210, 212, 214, 216, 218, 220, 222, 224, 226, 228, 230, 232, 234, 236, 238, 240, 242, 244, 246, 248, 250, 252, 254, 256, 258, 260, 262, 264, 266, 268, 270, 272, 274, 276, 278, 280, 282, 284, 286, 288, 290, 292, 294, 296, 298, 300, 302, 304, 306, 308, 310, 312, 314, 316, 318, 320, 322, 324, 326, 328, 330, 332, 334, 336, 338, 340, 342, 344, 346, 348, 350, 352, 354, 356, 358, 360, 362, 364, 366, 368, 370, 372, 374, 376, 378, 380, 382, 384, 386, 388, 390, 392, 394, 396, 398, 400, 402, 404, 406, 408, 410, 412, 414, 416, 418, 420, 422, 424, 426, 428, 430, 432, 434, 436, 438, 440, 442, 444, 446, 448, 450, 452, 454, 456, 458, 460, 462, 464, 466, 468, 470, 472, 474, 476, 478, 480, 482, 484, 486, 488, 490, 492, 494, 496, 498, 500, 502, 504, 506, 508, 510, 512, 514, 516, 518, 520, 522, 524, 526, 528, 530, 532, 534, 536, 538, 540, 542, 544, 546, 548, 550, 552, 554, 556, 558, 560, 562, 564, 566, 568, 570, 572, 574, 576, 578, 580, 582, 584, 586, 588, 590, 592, 594, 596, 598, 600, 602, 604, 606, 608, 610, 612, 614, 616, 618, 620, 622, 624, 626, 628, 630, 632, 634, 636, 638, 640, 642, 644, 646, 648, 650, 652, 654, 656, 658, 660, 662, 664, 666, 668, 670, 672, 674, 676, 678, 680, 682, 684, 686, 688, 690, 692, 694, 696, 698, 700, 702, 704, 706, 708, 710, 712, 714, 716, 718, 720, 722, 724, 726, 728, 730, 732, 734, 736, 738, 740, 742, 744, 746, 748, 750, 752, 754, 756, 758, 760, 762, 764, 766, 768, 770, 772, 774, 776, 778, 780, 782, 784, 786, 788, 790, 792, 794, 796, 798, 800, 802, 804, 806, 808, 810, 812, 814, 816, 818, 820, 822, 824, 826, 828, 830, 832, 834, 836, 838, 840, 842, 844, 846, 848, 850, 852, 854, 856, 858, 860, 862, 864, 866, 868, 870, 872, 874, 876, 878, 880, 882, 884, 886, 888, 890, 892, 894, 896, 898, 900, 902, 904, 906, 908, 910, 912, 914, 916, 918, 920, 922, 924, 926, 928, 930, 932, 934, 936, 938, 940, 942, 944, 946, 948, 950, 952, 954, 956, 958, 960, 962, 964, 966, 968, 970, 972, 974, 976, 978, 980, 982, 984, 986, 988, 990, 992, 994, 996, 998, 1000, 1002, 1004, 1006, 1008, 1010, 1012, 1014, 1016, 1018, 1020, 1022, 1024, 1026, 1028, 1030, 1032, 1034, 1036, 1038, 1040, 1042, 1044, 1046, 1048, 1050, 1052, 1054, 1056, 1058, 1060, 1062, 1064, 1066, 1068, 1070, 1072, 1074, 1076, 1078, 1080, 1082, 1084, 1086, 1088, 1090, 1092, 1094, 1096, 1098, 1100, 1102, 1104, 1106, 1108, 1110, 1112, 1114, 1116, 1118, 1120, 1122, 1124, 1126, 1128, 1130, 1132, 1134, 1136, 1138, 1140, 1142, 1144, 1146, 1148, 1150, 1152, 1154, 1156, 1158, 1160, 1162, 1164, 1166, 1168, 1170, 1172, 1174, 1176, 1178, 1180, 1182, 1184, 1186, 1188, 1190, 1192, 1194, 1196, 1198, 1200, 1202, 1204, 1206, 1208, 1210, 1212, 1214, 1216, 1218, 1220, 1222, 1224, 1226, 1228, 1230, 1232, 1234, 1236, 1238, 1240, 1242, 1244, 1246, 1248, 1250, 1252, 1254, 1256, 1258, 1260, 1262, 1264, 1266, 1268, 1270, 1272, 1274, 1276, 1278, 1280, 1282, 1284, 1286, 1288, 1290, 1292, 1294, 1296, 1298, 1300, 1302, 1304, 1306, 1308, 1310, 1312, 1314, 1316, 1318, 1320, 1322, 1324, 1326, 1328, 1330, 1332, 1334, 1336, 1338, 1340, 1342, 1344, 1346, 1348, 1350, 1352, 1354, 1356, 1358, 1360, 1362, 1364, 1366, 1368, 1370 & 1372.

2. A protein having 50% or greater sequence identity to a protein according to claim 1.

3. A protein comprising a fragment of 7 or more consecutive amino acids from an amino acid sequence selected from the group consisting of SEQ IDs 2, 4, 6, 8, 10, 12, 14, 16, 18, 20, 22, 24, 26, 28, 30, 32, 34, 36, 38, 40, 42, 44, 46, 48, 50, 52, 54, 56, 58, 60, 62, 64, 66, 68, 70, 72, 74, 76, 78, 80, 82, 84, 86, 88, 90, 92, 94, 96, 98, 100, 102, 104, 106, 108, 110, 112, 114, 116, 118, 120, 122, 124, 126, 128, 130, 132, 134, 136, 138, 140, 142, 144, 146, 148, 150, 152, 154, 156, 158, 160, 162, 164, 166, 168, 170, 172, 174, 176, 178, 180, 182, 184, 186, 188, 190, 192, 194, 196, 198, 200, 202, 204, 206, 208, 210, 212, 214, 216, 218, 220, 222, 224, 226, 228, 230, 232, 234, 236, 238, 240, 242, 244, 246, 248, 250, 252, 254, 256, 258, 260, 262, 264, 266, 268, 270, 272, 274, 276, 278, 280, 282, 284, 286, 288, 290, 292, 294, 296, 298, 300, 302, 304, 306, 308, 310, 312, 314, 316, 318, 320, 322, 324, 326, 328, 330, 332, 334, 336, 338, 340, 342, 344, 346, 348, 350, 352, 354, 356, 358, 360, 362, 364, 366, 368, 370, 372, 374, 376, 378, 380, 382, 384, 386, 388, 390, 392, 394, 396, 398, 400, 402, 404, 406, 408, 410, 412, 414, 416, 418, 420, 422, 424, 426, 428, 430, 432, 434, 436, 438, 440, 442, 444, 446, 448, 450, 452, 454, 456, 458, 460, 462, 464, 466, 468, 470, 472, 474, 476, 478, 480, 482, 484, 486, 488, 490, 492, 494, 496, 498, 500, 502, 504, 506, 508, 510, 512, 514, 516, 518, 520, 522, 524, 526, 528, 530, 532, 534, 536, 538, 540, 542, 544, 546, 548, 550, 552, 554, 556, 558, 560, 562, 564, 566, 568, 570, 572, 574, 576, 578, 580, 582, 584, 586, 588, 590, 592, 594, 596, 598, 600, 602, 604, 606, 608, 610, 612, 614, 616, 618, 620, 622, 624, 626, 628, 630, 632, 634, 636, 638, 640, 642, 644, 646, 648, 650, 652, 654, 656, 658, 660, 662, 664, 666, 668, 670, 672, 674, 676, 678, 680, 682, 684, 686, 688, 690, 692, 694, 696, 698, 700, 702, 704, 706, 708, 710, 712, 714, 716, 718, 720, 722, 724, 726, 728, 730, 732, 734, 736, 738, 740, 742, 744, 746, 748, 750, 752, 754, 756, 758, 760, 762, 764, 766, 768, 770, 772, 774, 776, 778, 780, 782, 784, 786, 788, 790, 792, 794, 796, 798, 800, 802, 804, 806, 808, 810, 812, 814, 816, 818, 820, 822, 824, 826, 828, 830, 832, 834, 836, 838, 840, 842, 844, 846, 848, 850, 852, 854, 856, 858, 860, 862, 864, 866, 868, 870, 872, 874, 876, 878, 880, 882, 884, 886, 888, 890, 892, 894, 896, 898, 900, 902, 904, 906, 908, 910, 912, 914, 916, 918, 920, 922, 924, 926, 928, 930, 932, 934, 936, 938, 940, 942, 944, 946, 948, 950, 952, 954, 956, 958, 960, 962, 964, 966, 968, 970, 972, 974, 976, 978, 980, 982, 984, 986, 988, 990, 992, 994, 996, 998, 1000, 1002, 1004, 1006, 1008, 1010, 1012, 1014, 1016, 1018, 1020, 1022, 1024, 1026, 1028, 1030, 1032, 1034, 1036, 1038, 1040, 1042, 1044, 1046, 1048, 1050, 1052, 1054, 1056, 1058, 1060, 1062, 1064, 1066, 1068, 1070, 1072, 1074, 1076, 1078, 1080, 1082, 1084, 1086, 1088, 1090, 1092, 1094, 1096, 1098, 1100, 1102, 1104, 1106, 1108, 1110, 1112, 1114, 1116, 1118, 1120, 1122, 1124, 1126, 1128, 1130, 1132, 1134, 1136, 1138, 1140, 1142, 1144, 1146, 1148, 1150, 1152, 1154, 1156, 1158, 1160, 1162, 1164, 1166, 1168, 1170, 1172, 1174, 1176, 1178, 1180, 1182, 1184, 1186, 1188, 1190, 1192, 1194, 1196, 1198, 1200, 1202, 1204, 1206, 1208, 1210, 1212, 1214, 1216, 1218, 1220, 1222, 1224, 1226, 1228, 1230, 1232, 1234, 1236, 1238, 1240, 1242, 1244, 1246, 1248, 1250, 1252, 1254, 1256, 1258, 1260, 1262, 1264, 1266, 1268, 1270, 1272, 1274, 1276, 1278, 1280, 1282, 1284, 1286, 1288, 1290, 1292, 1294, 1296, 1298, 1300, 1302, 1304, 1306, 1308, 1310, 1312, 1314, 1316, 1318, 1320, 1322, 1324, 1326, 1328, 1330, 1332, 1334, 1336, 1338, 1340, 1342, 1344, 1346, 1348, 1350, 1352, 1354, 1356, 1358, 1360, 1362, 1364, 1366, 1368, 1370 & 1372.

4. An antibody which binds to a protein according to any one of claims 1 to 3.

5. The antibody of claim 4, wherein said antibody is a monoclonal antibody, a chimeric antibody, a humanised antibody, or a fully human antibody.

6. A nucleic acid molecule which encodes a protein according to any one of claims 1 to 3.

7. A nucleic acid molecule according to claim 6, comprising a nucleotide sequence selected from the group consisting of SEQ IDs 1, 3, 5, 7, 9, 11, 13, 15, 17, 19, 21, 23, 25, 27, 29, 31, 33, 35, 37, 39, 41, 43, 45, 47, 49, 51, 53, 55, 57, 59, 61, 63, 65, 67, 69, 71, 73, 75, 77, 79, 81, 83, 85, 87, 89, 91, 93, 95, 97, 99, 101, 103, 105, 107, 109, 111, 113, 115, 117, 119, 121, 123, 125, 127, 129, 131, 133, 135, 137, 139, 141, 143, 145, 147, 149, 151, 153, 155, 157, 159, 161, 163, 165, 167, 169, 171, 173, 175, 177, 179, 181, 183, 185, 187, 189, 191, 193, 195, 197, 199, 201, 203, 205, 207, 209, 211, 213, 215, 217, 219, 221, 223, 225, 227, 229, 231, 233, 235, 237, 239, 241, 243, 245, 247, 249, 251, 253, 255, 257, 259, 261, 263, 265, 267, 269, 271, 273, 275, 277, 279, 281, 283, 285, 287, 289, 291, 293, 295, 297, 299, 301, 303, 305, 307, 309, 311, 313, 315, 317, 319, 321, 323, 325, 327, 329, 331, 333, 335, 337, 339, 341, 343, 345, 347, 349, 351, 353, 355, 357, 359, 361, 363, 365, 367, 369, 371, 373, 375, 377, 379, 381, 383, 385, 387, 389, 391, 393, 395, 397, 399, 401, 403, 405, 407, 409, 411, 413, 415, 417, 419, 421, 423, 425, 427, 429, 431, 433, 435, 437, 439, 441, 443, 445, 447, 449, 451, 453, 455, 457, 459, 461, 463, 465, 467, 469, 471, 473, 475, 477, 479, 481, 483, 485, 487, 489, 491, 493, 495, 497, 499, 501, 503, 505, 507, 509, 511, 513, 515, 517, 519, 521, 523, 525, 527, 529, 531, 533, 535, 537, 539, 541, 543, 545, 547, 549, 551, 553, 555, 557, 559, 561, 563, 565, 567, 569, 571, 573, 575, 577, 579, 581, 583, 585, 587, 589, 591, 593, 595, 597, 599, 601, 603, 605, 607, 609, 611, 613, 615, 617, 619, 621, 623, 625, 627, 629, 631, 633, 635, 637, 639, 641, 643, 645, 647, 649, 651, 653, 655, 657, 659, 661, 663, 665, 667, 669, 671, 673, 675, 677, 679, 681, 683, 685, 687, 689, 691, 693, 695, 697, 699, 701, 703, 705, 707, 709, 711, 713, 715, 717, 719, 721, 723, 725, 727, 729, 731, 733, 735, 737, 739, 741, 743, 745, 747, 749, 751, 753, 755, 757, 759, 761, 763, 765, 767, 769, 771, 773, 775, 777, 779, 781, 783, 785, 787, 789, 791, 793, 795, 797, 799, 801, 803, 805, 807, 809, 811, 813, 815, 817, 819, 821, 823, 825, 827, 829, 831, 833, 835, 837, 839, 841, 843, 845, 847, 849, 851, 853, 855, 857, 859, 861, 863, 865, 867, 869, 871, 873, 875, 877, 879, 881, 883, 885, 887, 889, 891, 893, 895, 897, 899, 901, 903, 905, 907, 909, 911, 913, 915, 917, 919, 921, 923, 925, 927, 929, 931, 933, 935, 937, 939, 941, 943, 945, 947, 949, 951, 953, 955, 957, 959, 961, 963, 965, 967, 969, 971, 973, 975, 977, 979, 981, 983, 985, 987, 989, 991, 993, 995, 997, 999, 1001, 1003, 1005, 1007, 1009, 1011, 1013, 1015, 1017, 1019, 1021, 1023, 1025, 1027, 1029, 1031, 1033, 1035, 1037, 1039, 1041, 1043, 1045, 1047, 1049, 1051, 1053, 1055, 1057, 1059, 1061, 1063, 1065, 1067, 1069, 1071, 1073, 1075, 1077, 1079, 1081, 1083, 1085, 1087, 1089, 1091, 1093, 1095, 1097, 1099, 1101, 1103, 1105, 1107, 1109, 1111, 1113, 1115, 1117, 1119, 1121, 1123, 1125, 1127, 1129, 1131, 1133, 1135, 1137, 1139, 1141, 1143, 1145, 1147, 1149, 1151, 1153, 1155, 1157, 1159, 1161, 1163, 1165, 1167, 1169, 1171, 1173, 1175, 1177, 1179, 1181, 1183, 1185, 1187, 1189, 1191, 1193, 1195, 1197, 1199, 1201, 1203, 1205, 1207, 1209, 1211, 1213, 1215, 1217, 1219, 1221, 1223, 1225, 1227, 1229, 1231, 1233, 1235, 1237, 1239, 1241, 1243, 1245, 1247, 1249, 1251, 1253, 1255, 1257, 1259, 1261, 1263, 1265, 1267, 1269, 1271, 1273, 1275, 1277, 1279, 1281, 1283, 1285, 1287, 1289, 1291, 1293, 1295, 1297, 1299, 1301, 1303, 1305, 1307, 1309, 1311, 1313, 1315, 1317, 1319, 1321, 1323, 1325, 1327, 1329, 1331, 1333, 1335, 1337, 1339, 1341, 1343, 1345, 1347, 1349, 1351, 1353, 1355, 1357, 1359, 1361, 1363, 1365, 1367, 1369 & 1371.

8. A nucleic acid molecule comprising a nucleotide sequence selected from the group consisting of SEQ IDs 1, 3, 5, 7, 9, 11, 13, 15, 17, 19, 21, 23, 25, 27, 29, 31, 33, 35, 37, 39, 41, 43, 45, 47, 49, 51, 53, 55, 57, 59, 61, 63, 65, 67, 69, 71, 73, 75, 77, 79, 81, 83, 85, 87, 89, 91, 93, 95, 97, 99, 101, 103, 105, 107, 109, 111, 113, 115, 117, 119, 121, 123, 125, 127, 129, 131, 133, 135, 137, 139, 141, 143, 145, 147, 149, 151, 153, 155, 157, 159, 161, 163, 165, 167, 169, 171, 173, 175, 177, 179, 181, 183, 185, 187, 189, 191, 193, 195, 197, 199, 201, 203, 205, 207, 209, 211, 213, 215, 217, 219, 221, 223, 225, 227, 229, 231, 233, 235, 237, 239, 241, 243, 245, 247, 249, 251, 253, 255, 257, 259, 261, 263, 265, 267, 269, 271, 273, 275, 277, 279, 281, 283, 285, 287, 289, 291, 293, 295, 297, 299, 301, 303, 305, 307, 309, 311, 313, 315, 317, 319, 321, 323, 325, 327, 329, 331, 333, 335, 337, 339, 341, 343, 345, 347, 349, 351, 353, 355, 357, 359, 361, 363, 365, 367, 369, 371, 373, 375, 377, 379, 381, 383, 385, 387, 389, 391, 393, 395, 397, 399, 401, 403, 405, 407, 409, 411, 413, 415, 417, 419, 421, 423, 425, 427, 429, 431, 433, 435, 437, 439, 441, 443, 445, 447, 449, 451, 453, 455, 457, 459, 461, 463, 465, 467, 469, 471, 473, 475, 477, 479, 481, 483, 485, 487, 489, 491, 493, 495, 497, 499, 501, 503, 505, 507, 509, 511, 513, 515, 517, 519, 521, 523, 525, 527, 529, 531, 533, 535, 537, 539, 541, 543, 545, 547, 549, 551, 553, 555, 557, 559, 561, 563, 565, 567, 569, 571, 573, 575, 577, 579, 581, 583, 585, 587, 589, 591, 593, 595, 597, 599, 601, 603, 605, 607, 609, 611, 613, 615, 617, 619, 621, 623, 625, 627, 629, 631, 633, 635, 637, 639, 641, 643, 645, 647, 649, 651, 653, 655, 657, 659, 661, 663, 665, 667, 669, 671, 673, 675, 677, 679, 681, 683, 685, 687, 689, 691, 693, 695, 697, 699, 701, 703, 705, 707, 709, 711, 713, 715, 717, 719, 721, 723, 725, 727, 729, 731, 733, 735, 737, 739, 741, 743, 745, 747, 749, 751, 753, 755, 757, 759, 761, 763, 765, 767, 769, 771, 773, 775, 777, 779, 781, 783, 785, 787, 789, 791, 793, 795, 797, 799, 801, 803, 805, 807, 809, 811, 813, 815, 817, 819, 821, 823, 825, 827, 829, 831, 833, 835, 837, 839, 841, 843, 845, 847, 849, 851, 853, 855, 857, 859, 861, 863, 865, 867, 869, 871, 873, 875, 877, 879, 881, 883, 885, 887, 889, 891, 893, 895, 897, 899, 901, 903, 905, 907, 909, 911, 913, 915, 917, 919, 921, 923, 925, 927, 929, 931, 933, 935, 937, 939, 941, 943, 945, 947, 949, 951, 953, 955, 957, 959, 961, 963, 965, 967, 969, 971, 973, 975, 977, 979, 981, 983, 985, 987, 989, 991, 993, 995, 997, 999, 1001, 1003, 1005, 1007, 1009, 1011, 1013, 1015, 1017, 1019, 1021, 1023, 1025, 1027, 1029, 1031, 1033, 1035, 1037, 1039, 1041, 1043, 1045, 1047, 1049, 1051, 1053, 1055, 1057, 1059, 1061, 1063, 1065, 1067, 1069, 1071, 1073, 1075, 1077, 1079, 1081, 1083, 1085, 1087, 1089, 1091, 1093, 1095, 1097, 1099, 1101, 1103, 1105, 1107, 1109, 1111, 1113, 1115, 1117, 1119, 1121, 1123, 1125, 1127, 1129, 1131, 1133, 1135, 1137, 1139, 1141, 1143, 1145, 1147, 1149, 1151, 1153, 1155, 1157, 1159, 1161, 1163, 1165, 1167, 1169, 1171, 1173, 1175, 1177, 1179, 1181, 1183, 1185, 1187, 1189, 1191, 1193, 1195, 1197, 1199, 1201, 1203, 1205, 1207, 1209, 1211, 1213, 1215, 1217, 1219, 1221, 1223, 1225, 1227, 1229, 1231, 1233, 1235, 1237, 1239, 1241, 1243, 1245, 1247, 1249, 1251, 1253, 1255, 1257, 1259, 1261, 1263, 1265, 1267, 1269, 1271, 1273, 1275, 1277, 1279, 1281, 1283, 1285, 1287, 1289, 1291, 1293, 1295, 1297, 1299, 1301, 1303, 1305, 1307, 1309, 1311, 1313, 1315, 1317, 1319, 1321, 1323, 1325, 1327, 1329, 1331, 1333, 1335, 1337, 1339, 1341, 1343, 1345, 1347, 1349, 1351, 1353, 1355, 1357, 1359, 1361, 1363, 1365, 1367, 1369 & 1371.

9. A nucleic acid molecule comprising a fragment of 10 or more consecutive nucleotides from a nucleotide sequence selected from the group consisting of SEQ IDs 1, 3, 5, 7, 9, 11, 13, 15, 17, 19, 21, 23, 25, 27, 29, 31, 33, 35, 37, 39, 41, 43, 45, 47, 49, 51, 53, 55, 57, 59, 61, 63, 65, 67, 69, 71, 73, 75, 77, 79, 81, 83, 85, 87, 89, 91, 93, 95, 97, 99, 101, 103, 105, 107, 109, 111, 113, 115, 117, 119, 121, 123, 125, 127, 129, 131, 133, 135, 137, 139, 141, 143, 145, 147, 149, 151, 153, 155, 157, 159, 161, 163, 165, 167, 169, 171, 173, 175, 177, 179, 181, 183, 185, 187, 189, 191, 193, 195, 197, 199, 201, 203, 205, 207, 209, 211, 213, 215, 217, 219, 221, 223, 225, 227, 229, 231, 233, 235, 237, 239, 241, 243, 245, 247, 249, 251, 253, 255, 257, 259, 261, 263, 265, 267, 269, 271, 273, 275, 277, 279, 281, 283, 285, 287, 289, 291, 293, 295, 297, 299, 301, 303, 305, 307, 309, 311, 313, 315, 317, 319, 321, 323, 325, 327, 329, 331, 333, 335, 337, 339, 341, 343, 345, 347, 349, 351, 353, 355, 357, 359, 361, 363, 365, 367, 369, 371, 373, 375, 377, 379, 381, 383, 385, 387, 389, 391, 393, 395, 397, 399, 401, 403, 405, 407, 409, 411, 413, 415, 417, 419, 421, 423, 425, 427, 429, 431, 433, 435, 437, 439, 441, 443, 445, 447, 449, 451, 453, 455, 457, 459, 461, 463, 465, 467, 469, 471, 473, 475, 477, 479, 481, 483, 485, 487, 489, 491, 493, 495, 497, 499, 501, 503, 505, 507, 509, 511, 513, 515, 517, 519, 521, 523, 525, 527, 529, 531, 533, 535, 537, 539, 541, 543, 545, 547, 549, 551, 553, 555, 557, 559, 561, 563, 565, 567, 569, 571, 573, 575, 577, 579, 581, 583, 585, 587, 589, 591, 593, 595, 597, 599, 601, 603, 605, 607, 609, 611, 613, 615, 617, 619, 621, 623, 625, 627, 629, 631, 633, 635, 637, 639, 641, 643, 645, 647, 649, 651, 653, 655, 657, 659, 661, 663, 665, 667, 669, 671, 673, 675, 677, 679, 681, 683, 685, 687, 689, 691, 693, 695, 697, 699, 701, 703, 705, 707, 709, 711, 713, 715, 717, 719, 721, 723, 725, 727, 729, 731, 733, 735, 737, 739, 741, 743, 745, 747, 749, 751, 753, 755, 757, 759, 761, 763, 765, 767, 769, 771, 773, 775, 777, 779, 781, 783, 785, 787, 789, 791, 793, 795, 797, 799, 801, 803, 805, 807, 809, 811, 813, 815, 817, 819, 821, 823, 825, 827, 829, 831, 833, 835, 837, 839, 841, 843, 845, 847, 849, 851, 853, 855, 857, 859, 861, 863, 865, 867, 869, 871, 873, 875, 877, 879, 881, 883, 885, 887, 889, 891, 893, 895, 897, 899, 901, 903, 905, 907, 909, 911, 913, 915, 917, 919, 921, 923, 925, 927, 929, 931, 933, 935, 937, 939, 941, 943, 945, 947, 949, 951, 953, 955, 957, 959, 961, 963, 965, 967, 969, 971, 973, 975, 977, 979, 981, 983, 985, 987, 989, 991, 993, 995, 997, 999, 1001, 1003, 1005, 1007, 1009, 1011, 1013, 1015, 1017, 1019, 1021, 1023, 1025, 1027, 1029, 1031, 1033, 1035, 1037, 1039, 1041, 1043, 1045, 1047, 1049, 1051, 1053, 1055, 1057, 1059, 1061, 1063, 1065, 1067, 1069, 1071, 1073, 1075, 1077, 1079, 1081, 1083, 1085, 1087, 1089, 1091, 1093, 1095, 1097, 1099, 1101, 1103, 1105, 1107, 1109, 1111, 1113, 1115, 1117, 1119, 1121, 1123, 1125, 1127, 1129, 1131, 1133, 1135, 1137, 1139, 1141, 1143, 1145, 1147, 1149, 1151, 1153, 1155, 1157, 1159, 1161, 1163, 1165, 1167, 1169, 1171, 1173, 1175, 1177, 1179, 1181, 1183, 1185, 1187, 1189, 1191, 1193, 1195, 1197, 1199, 1201, 1203, 1205, 1207, 1209, 1211, 1213, 1215, 1217, 1219, 1221, 1223, 1225, 1227, 1229, 1231, 1233, 1235, 1237, 1239, 1241, 1243, 1245, 1247, 1249, 1251, 1253, 1255, 1257, 1259, 1261, 1263, 1265, 1267, 1269, 1271, 1273, 1275, 1277, 1279, 1281, 1283, 1285, 1287, 1289, 1291, 1293, 1295, 1297, 1299, 1301, 1303, 1305, 1307, 1309, 1311, 1313, 1315, 1317, 1319, 1321, 1323, 1325, 1327, 1329, 1331, 1333, 1335, 1337, 1339, 1341, 1343, 1345, 1347, 1349, 1351, 1353, 1355, 1357, 1359, 1361, 1363, 1365, 1367, 1369& 1371.

10. A nucleic acid molecule comprising a nucleotide sequence complementary to a nucleic acid molecule according to any one of claims 6 to 9.

11. A nucleic acid molecule comprising a nucleotide sequences having 50% or greater sequence identity to a nucleic acid molecule according to any one of claims 6 to 10.

12. A nucleic acid molecule which can hybridise to a nucleic acid molecule according to any one of claims 6 to 11 under high stringency conditions.

13. A composition comprising a protein, a nucleic acid molecule, or an antibody according to any preceding claim.

14. A composition according to claim 13, being an immunogenic composition, a vaccine composition or a diagnostic composition.

15. A composition according to claim 13 or claim 14 for use as a pharmaceutical.

16. The use of a composition according to claim 13 in the manufacture of a medicament for the treatment or prevention of infection or disease caused by streptococcus bacteria, particularly S. agalactiae and S. pyogenes.

17. A method of treating a patient, comprising administering to the patient a therapeutically effective amount of the composition of claim 13.

18. A hybrid protein represented by the formula NH₂-A-[-X-L-]ₙ-B—COOH, wherein X is an amino acid sequence as defined in claim 1, L is an optional linker amino acid sequence, A is an optional N-terminal amino acid sequence, B is an optional C-terminal amino acid sequence, and n is an integer greater than 1.

19. A kit comprising primers for amplifying a template sequence contained within a Streptococcus nucleic acid sequence, the kit comprising a first primer and a second primer, wherein the first primer is substantially complementary to said template sequence and the second primer is substantially complementary to a complement of said template sequence, wherein the parts of said primers which have substantial complementarity define the termini of the template sequence to be amplified.

20. A kit comprising first and second single-stranded oligonucleotides which allow amplification of a Streptococcus template nucleic acid sequence contained in a single- or double-stranded nucleic acid (or mixture thereof), wherein: (a) the first oligonucleotide comprises a primer sequence which is substantially complementary to said template nucleic acid sequence; (b) the second oligonucleotide comprises a primer sequence which is substantially complementary to the complement of said template nucleic acid sequence; (c) the first oligonucleotide and/or the second oligonucleotide comprise(s) sequence which is not compementary to said template nucleic acid; and (d) said primer sequences define the termini of the template sequence to be amplified.

21. The kit of claim 20, wherein the non-complementary sequence(s) of (c) comprise a restriction site and/or a promoter sequence.

22. A computer-readable medium containing one or more of SEQ IDs 1 to 1373.

23. A process for detecting Streptococcus in a biological sample, comprising the step of contacting nucleic acid according to any of claims 6 to 12 with the biological sample under hybridising conditions.

24. The process of claim 23, wherein the process involves nucleic acid amplification.

25. A process for determining whether a compound binds to a protein according to claim 1, claim 2 or claim 3, comprising the step of contacting a test compound with a protein according to claim 1, claim 2 or claim 3 and determining whether the test compound binds to said protein.

26. A compound identified by the process of claim 25.

27. A composition comprising a protein according to claim 1, claim 2 or claim 3 and one or more of the following antigens:
a protein antigen from Helicobacter pylori;
a protein antigen from N. meningitidis serogroup B;
an outer-membrane vesicle (OMV) preparation from N. meningitidis serogroup B;
a saccharide antigen from N. meningitidis serogroup A, C, W135 and/or Y;
a saccharide antigen from Streptococcus pneumoniae;
an antigen from hepatitis A virus;
an antigen from hepatitis B virus;
an antigen from hepatitis C virus;
an antigen from Bordetella pertussis;
a diphtheria antigen;
a tetanus antigen;
a saccharide antigen from Haemophilus influenzae B.
an antigen from N. gonorrhoeae;
an antigen from Chlamydia pneumoniae;
an antigen from Chlamydia trachomatis;
an antigen from Porphyromonas gingivalis;
polio antigen(s);
rabies antigen(s);
measles, mumps and/or rubella antigens;
influenza antigen(s);
an antigen from Moraxella catarrhalis; and/or
an antigen from Staphylococcus aureus.

28. A composition comprising two or more proteins, wherein each protein is a protein according to claim 1, claim 2 or claim 3.

The application's sequence listing, which the Patent Office published only in electronic form, follows.

SEQUENCE LISTING (1373 sequences)

SEQ ID NO: 1 - DNA, 849 bp, Streptococcus agalactiae
atggttttatctgcgggttcccgagttttagcggatacttatgtccgtccaattgataatggtagaattacaacaggtttcaatggttatcctggacattgtggggtggattatgctgttccgactggaacgattattagggcagtggcagatggtactgtgaaatttgcaggagctggagccaacttttcttggatgacagacttagcaggaaattgtgtcatgattcaacatgcggatggaatgcatagtggttacgctcatatgtcacgtgtggtggctaggactggggaaaaagtcaaacaaggagatatcatcggttacgtaggagcaactggtatggcgacgggacctcaccttcattttgaatttttaccagctaaccctaattttcaaaatggtttccatggacgtatcaatccaacgtcactaattgctaatgttgcgacctttagtggaaaaacgcaagcatcagctccaagcattaagccattacaatcagctcctgtacagaatcaatctagtaaattaaaagtgtatcgagtagatgaattacaaaaggttaatggtgtttggttagtcaaaaataacaccctaacgccgactgggtttgattggaacgataatggtataccagcatcagaaattgatgaggttgatgctaatggtaatttgacagctgaccaggttcttcaaaaaggtggttactttatctttaatcctaaaactcttaagactgtagaaaaacccatccaaggaacagctggtttaacttgggctaagacacgctttgctaatggtagttcagtttggcttcgcgttgacaacagtcaagaactgctttacaaa

SEQ ID NO: 2 - protein, 283 aa, Streptococcus agalactiae
MVLSAGSRVLADTYVRPIDNGRITTGFNGYPGHCGVDYAVPTGTIIRAVADGTVKFAGAGANFSWMTDLAGNCVMIQHADGMHSGYAHMSRVVARTGEKVKQGDIIGYVGATGMATGPHLHFEFLPANPNFQNGFHGRINPTSLIANVATFSGKTQASAPSIKPLQSAPVQNQSSKLKVYRVDELQKVNGVWLVKNNTLTPTGFDWNDNGIPASEIDEVDANGNLTADQVLQKGGYFIFNPKTLKTVEKPIQGTAGLTWAKTRFANGSSVWLRVDNSQELLYK

SEQ ID NO: 3 - DNA, 1236 bp, Streptococcus agalactiae
atgattgaaaatatcttacaaatgctcatgggagtagttgataattatctagtggctcagttaggtgttgtagcagtatcaggtgtttcagttgctaataatataattactatttatcaagctatttttatagctttaggggcgagtatagcaagtctattggccaagtcgttagcaggtagtaagaaggatgatgcaatttcagtatgttctcaagccatttttctaacattactgataggggcagtattaggaattatctcgattgtttttggacaaactttctttaaacttttagggacaacaaaaagtgtcgcacaagttggtggtttatatttagcaattgtgggtggaggtgttgttactttaggaatgttaaccaccctaggctcatttttacgtgtgcaagggcaacctcgtttaccaatgtatgtcagtatttttgtcaatttcctcaatgcagtcttatcaggttttgctatttttgagtggcgctatggtttggtcggagtggcagtatcaactcttatcgcaagattaattggtatttgtatccttgcgaagtatcttcctattaaaaagataataaaaagaatgacttggaaaatcagtgcacaaatttggaatcttgccttaccatcagcaggagaacgtctgatgatgcgagctggagatgttgttatagttgctattgttgttcagttaggtacaaatgttgtagcgggaaatgctattggagaaaccttgacacaatttaattatatgccaggacttggcatcgcaactgctacaattatcctaactgcaaaatatgtaggacaaaaaaacagagaatctatagaagaaactattcaaagttcgtattatattggcttagttctaatgatccttatatcaagttttatgcttcttgcaggcaaaccattgacacagttatttacaaataatccttctgccattaaaggaagtttgattgttattttgctatctttcgtaggagtacctgctactattgggaccttggtttatacagcagcttggcaaggattaggaaatgctaaactcccattttacacaacgactataggcatgtggttaatcagagtagttcttggttatttattaggaatagtttttgaattaggtttgcttggggtttggatggctacgatagcagacaatatctttaggtggctgtttttgaaagttcactatcatcgatatattcaaaaaatg

SEQ ID NO: 4 - protein, 412 aa, Streptococcus agalactiae
MIENILQMLMGVVDNYLVAQLGVVAVSGVSVANNIITIYQAIFIALGASIASLLAKSLAGSKKDDAISVCSQAIFLTLLIGAVLGIISIVFGQTFFKLLGTTKSVAQVGGLYLAIVGGGVVTLGMLTTLGSFLRVQGQPRLPMYVSIFVNFLNAVLSGFAIFEWRYGLVGVAVSTLIARLIGICILAKYLPIKKIIKRMTWKISAQIWNLALPSAGERLMMRAGDVVIVAIVVQLGTNVVAGNAIGETLTQFNYMPGLGIATATIILTAKYVGQKNRESIEETIQSSYYIGLVLMILISSFMLLAGKPLTQLFTNNPSAIKGSLIVILLSFVGVPATIGTLVYTAAWQGLGNAKLPFYTTTIGMWLIRVVLGYLLGIVFELGLLGVWMATIADNIFRWLFLKVHYHRYIQKM

SEQ ID NO: 5 - DNA, 930 bp, Streptococcus agalactiae
atgatgaaatatatatcagagttaacaaccctgattgcgttagctggtttaatggttattatcacactcattaatcctaatttcctcacaaccaataatctactcaatttattattacaagtaactgcaaatggttttatcgctttcgggatgaccttcgttattttgactggcggtattgatttatcagtcgggtccatattagccctatctagtgcattaacagctggattaatcggccacggagtacccgttggtattgctatcgttttatctgttgccttaggtggcatcttgggaatgctaaacggactcttcatttcttacggaaaattagcaccatttatcgttacactggcaacaatgactatctttagaggagcaacgctagtttattcaaacggcaacccaattaccgctggcttatccgatagttttctattccaatttttgggacaaggctatattgttggtatcccattcccagtcattctcatgtttcttacttttattattttgtatattttgttacataaaacagccttcgggaaatctgtttacgctttaggaggtaatgaaaaagcagcgtatatctcgggtattaagttaaacaaagttaaaattatcatctacactatctcaggtatcatggcttccatttctgggttaattatcacatcacgccttagctcagcacaaccaacagctggagcaagttatgagatggatgctattgccgccgttgtcttaggtggaacgtctttatctggtgggaaaggacgtatcattggaacattgattggtgctcttattattggtgtcctgaacaatggattaaacatcattggtgtctctgcattttggcaacaagttgtgaaaggtatcgttattttaatggctgttttacttgatcgctttaaagtagcaaaa

SEQ ID NO: 6 - protein, 310 aa, Streptococcus agalactiae
MMKYISELTTLIALAGLMVIITLINPNFLTTNNLLNLLLQVTANGFIAFGMTFVILTGGIDLSVGSILALSSALTAGLIGHGVPVGIAIVLSVALGGILGMLNGLFISYGKLAPFIVTLATMTIFRGATLVYSNGNPITAGLSDSFLFQFLGQGYIVGIPFPVILMFLTFIILYILLHKTAFGKSVYALGGNEKAAYISGIKLNKVKIIIYTISGIMASISGLIITSRLSSAQPTAGASYEMDAIAAVVLGGTSLSGGKGRIIGTLIGALIIGVLNNGLNIIGVSAFWQQVVKGIVILMAVLLDRFKVAK

SEQ ID NO: 7 - DNA, 1158 bp, Streptococcus agalactiae
atgataccttttacaattgagtatatttttgtattgattggagcatttttattatcaatcattctaactcctattattcgagttatatctttgaaggtaggagcggttgataaaccgaacgctcgaagaatcaacaaagtaccaatgccaagtagtggtggtttagcaatatttctctcctttgttgtaacaacattatttttcatgccaatggcggccagtagacactttatagaagtctcttattttcactacattttgcctgtaattattggcggtctcgtagttacaacaacaggattcatagatgacatctttgaattaagacctcgttataaaatgttgggaattattattgcagctattatcatatggaaatttacacattttagatttgatagttttaagattccaataggtggtccactcttggagtttggtcctattttaactttctttttgacagttttatggattatttcaatcactaatgctatcaatctgattgatggtctagatggtctagttagtggtgtttcaattatcagtctagcaacgatggcagtggtttcttatttctttttacctaaaatagatttttttctcacgctaactattgttattttaatcgcctcaatagttggttttttcccttataattatcatccagccattatctacctaggtgatgctggtgccttgtttataggatttatgattggtgtattatcgcttcaaggtttaaaaaactccacagctgttgcagtgataacacctgtcattattttaggagttcctattttggatacagctgttgctattgtgaggcgtaaattatcagggaaaaagatttctgaagctgataagatgcacctgcatcaccgattgctatctatgggatttacacatagaggagcagttttagttgtttatggtattgcaattatcttttcgcttatcgctttgcttttaaatgtttctagtcgtattgggggaatttttcttctattggcgctactattagcgatggaaatttttatagaaggtttaaatatttggggtgagaatcggacaccactatttaatctcttaaagttcattggcaacagtgattacagacaaagtgttattgctaaatatagcgataagcatcaaaaa

SEQ ID NO: 8 - protein, 386 aa, Streptococcus agalactiae
MIPFTIEYIFVLIGAFLLSIILTPIIRVISLKVGAVDKPNARRINKVPMPSSGGLAIFLSFVVTTLFFMPMAASRHFIEVSYFHYILPVIIGGLVVTTTGFIDDIFELRPRYKMLGIIIAAIIIWKFTHFRFDSFKIPIGGPLLEFGPILTFFLTVLWIISITNAINLIDGLDGLVSGVSIISLATMAVVSYFFLPKIDFFLTLTIVILIASIVGFFPYNYHPAIIYLGDAGALFIGFMIGVLSLQGLKNSTAVAVITPVIILGVPILDTAVAIVRRKLSGKKISEADKMHLHHRLLSMGFTHRGAVLVVYGIAIIFSLIALLLNVSSRIGGIFLLLALLLAMEIFIEGLNIWGENRTPLFNLLKFIGNSDYRQSVIAKYSDKHQK

SEQ ID NO: 9 - DNA, 639 bp, Streptococcus agalactiae
atgaatactttccaacaatttatctactacttccaacataatggtagttatatcttagaacaatttatccaccactttttaatttcagtttacggcgttattttagctgcaattgttggtatccctctaggtatcttcatcgctagacgtggtaaaattaaaacctttgttatgggaatcgcaaatgtcatccaaaccattccttctttagctatgatctctatcattatgttaggtctagggctaggtattaaaacagtagttgcaactgtctttctttattctcttctgccaatcatcacaaatacttacactggtattagaaatgttgactccgacttactagatgctgctaaaggaatgggcatgactaagcgtcaacgtttatttatggttgagttaccactatctatttccgttatcatggctggacttagaaatgcccttgttgtagcaattggtattacagccattggtgctttcgtcgggggaggcggacttggagatatcatcataagaggaactaatgcaacaaatggtggtgctattatcttagcaggatctcttccaacagcccttatggcaattttctctgatttaatcctaggcggtatccaacgcatgcttgaaccaagaaaa

SEQ ID NO: 10 - protein, 213 aa, Streptococcus agalactiae
MNTFQQFIYYFQHNGSYILEQFIHHFLISVYGVILAAIVGIPLGIFIARRGKIKTFVMGIANVIQTIPSLAMISIIMLGLGLGIKTVVATVFLYSLLPIITNTYTGIRNVDSDLLDAAKGMGMTKRQRLFMVELPLSISVIMAGLRNALVVAIGITAIGAFVGGGGLGDIIIRGTNATNGGAIILAGSLPTALMAIFSDLILGGIQRMLEPRK

SEQ ID NO: 11 - DNA, 513 bp, Streptococcus agalactiae
atgttattagaagcacaagagcgacaagcaagtttagttagtgtatttggagaagataggcatgactttataaaccaagttattaaatctacacctaaaatctctaagaaagaagaaacattacaacgttgggatttagccattttactactaactatccaaatgattatctttttaggaggatatctcattactgaagcacttcaacagtcagtaccagatctaatccctattactctattagatgttctttttgcaatctttatcagtattattgctgtcaagatagctgataccataatatatgctacatataacttcgataaatcgaaagaaaagaaatatttctttcgatatatatttctaattctttcgcttatcatagcttatatccttataggaaaatattatcatcttcctttcattaatatccccctttggatttatttaattatactgggacttagcttctctcttcatatcattgttaaaaaatacctgaataaacattat

SEQ ID NO: 12 - protein, 171 aa, Streptococcus agalactiae
MLLEAQERQASLVSVFGEDRHDFINQVIKSTPKISKKEETLQRWDLAILLLTIQMIIFLGGYLITEALQQSVPDLIPITLLDVLFAIFISIIAVKIADTIIYATYNFDKSKEKKYFFRYIFLILSLIIAYILIGKYYHLPFINIPLWIYLIILGLSFSLHIIVKKYLNKHY

SEQ ID NO: 13 - DNA, 789 bp, Streptococcus agalactiae
ttgaagttcgaaaatataatatatggtattgatggcaacgtggccactattatgcttaatcgaccagatatttcaaatggttttaacatcccaatgtgtcaagaaattattgatgcaataaggcttgtgtctgaaaataaagatgtcatgtttttagtgattgaagcacaaggaccaatcttttcaatcggaggagatttaaaagtgatgaaagctgctgttgagagcgatgatattagctcattaactaaaattgctgagttagttaatcagatatcgtatgatttactacagctagagaaacctgttgttatgtgtgtagatggggctgtagctggtgccgcagctaatattgcattagcagctgattttgttatcgcaagcaagaagagtaaatttatccaggcttttgtgggtgtcggtttagctccagatgcaggaggtttattgttacttagtaaatcaatcggtataactcgtgcagtgcaactagctttaactggagaaagcttatctgctgaaaaagctgaagctttgggaattgtttataaactttgtgaatcagataaaataggtaaaattaaggatcaactattaaagcgtttaagtagacattctataaactcatatcaagccataaaatcattagcttgggaagctgcttttaaagattgggaacaatataaaaagcttgaattacaactgcaagaatcattagcctttaagcaagattttaaagaaggtgttcgggcacacgctgatagaaggcgtcctaattttttaggcaaa

SEQ ID NO: 14 - protein, 263 aa, Streptococcus agalactiae
MKFENIIYGIDGNVATIMLNRPDISNGFNIPMCQEIIDAIRLVSENKDVMFLVIEAQGPIFSIGGDLKVMKAAVESDDISSLTKIAELVNQISYDLLQLEKPVVMCVDGAVAGAAANIALAADFVIASKKSKFIQAFVGVGLAPDAGGLLLLSKSIGITRAVQLALTGESLSAEKAEALGIVYKLCESDKIGKIKDQLLKRLSRHSINSYQAIKSLAWEAAFKDWEQYKKLELQLQESLAFKQDFKEGVRAHADRRRPNFLGK

SEQ ID NO: 15 - DNA, 1737 bp, Streptococcus agalactiae
atgaagtctaatcaatggcaagtctttaagagattaatctcctatttacgcccttataaatggtttacagtattagctctatctctcttattgttgacgactgttgttaaaaatattattcctttaattgcttcacattttattgatcactatctgacaaatgttaatcaaacagcagttcttattttagtgggatattattcaatgtatgtcttgcagaccttaattcaatattttgggaatctcttttttgcgcgtgtttcttatagtattgttagagatattcgtagagatgcttttgctaatatggaaaggcttggcatgtcttattttgataggacaccggcaggatctatagtgtcacgtattactaatgatactgaagcaatatctgatatgttttcgggtattttatcgagttttatctcggcgatatttatttttacagttactctgtacactatgttgatgctagacattaaactaacaggacttgtcgctcttttattacctgttatctttatattagtgaatgtctatcggaaaaaatcagtcactgtcattgctaaaacgagaagtttacttagtgatatcaacagtaaattatcagaaagtattgaaggaattcgcattgtacaggcttttggtcaagaagagcgcttgaagactgaatttgaggaaattaacaaagagcatgttgtgtatgccaatcgttctatggctcttgatagtctcttcttaagaccggcgatgtctcttttaaaactcctagcatatgctgttcttatggcttattttggatttacaggagttaaaggaggtcttacggcaggattgatgtatgcttttattcagtacgttaatcgtctctttgaccctttaattgaagtaacgcaaaatttttcaaccttacaaacatcaatggtatcagcagggcgtgtgtttgatttgattgatgaaacaggttttgaaccaagccaaaaaaatacagaagcttttgtgagagaaggaaatatcgaatttaaaaatgtatcattctcatatgatggaaaaaaacaaatccttgataatgtttcttttagtgttaaaaaaggtgaaacgattgcttttgtaggagcgacaggttctggaaaatcatctattattaatgtctttatgaggttttacgaatttcaatctggacaagttttattagatgggaaggatattagggattactcacaagaacaattgcgaaagaatattggactcgtcttacaagacccctttttatatcatggcactattaaatctaatatcaaaatgtaccaagacatcaccgatcaagaggtacaggacgcagcagagtttgttgatgctgatcaatttattcagaagttgccagataagtacgatgcagctgtttcagaacgtgggtcaagtttttcgactggacaacgccaactattggcgtttgccagaactgtggctagtaaacctaaaattttaatcttagatgaagcgacagcaaatattgattcggaaacagagcagattgtacaagattcgttagcaaaaatgcgtcaaggtcgaacaacaattgccattgctcaccgcttatcaaccattcaagatgctaattgtatctatgttcttgatagaggaaagataattgaaagtgggaatcacgagtctttattagacctaaaagggacttattatcgtatgtaccaattacaagctggcatgatggaggtc

SEQ ID NO: 16 - protein, 579 aa, Streptococcus agalactiae
MKSNQWQVFKRLISYLRPYKWFTVLALSLLLLTTVVKNIIPLIASHFIDHYLTNVNQTAVLILVGYYSMYVLQTLIQYFGNLFFARVSYSIVRDIRRDAFANMERLGMSYFDRTPAGSIVSRITNDTEAISDMFSGILSSFISAIFIFTVTLYTMLMLDIKLTGLVALLLPVIFILVNVYRKKSVTVIAKTRSLLSDINSKLSESIEGIRIVQAFGQEERLKTEFEEINKEHVVYANRSMALDSLFLRPAMSLLKLLAYAVLMAYFGFTGVKGGLTAGLMYAFIQYVNRLFDPLIEVTQNFSTLQTSMVSAGRVFDLIDETGFEPSQKNTEAFVREGNIEFKNVSFSYDGKKQILDNVSFSVKKGETIAFVGATGSGKSSIINVFMRFYEFQSGQVLLDGKDIRDYSQEQLRKNIGLVLQDPFLYHGTIKSNIKMYQDITDQEVQDAAEFVDADQFIQKLPDKYDAAVSERGSSFSTGQRQLLAFARTVASKPKILILDEATANIDSETEQIVQDSLAKMRQGRTTIAIAHRLSTIQDANCIYVLDRGKIIESGNHESLLDLKGTYYRMYQLQAGMMEV

SEQ ID NO: 17 - DNA, 1287 bp, Streptococcus agalactiae
atgaatgtaattggggttagcaacgtccctagttccggtgtaaaagatggtataattattgatattgaggcagcagcaactgcaatcaaagaggcggtaaaacaagctgaggagaaagcaggcatcaccattgacaaaatcaatgttggattaccagcaaatcttctccaaattgaaccaactcaaggaatgattcctgttcctaatgaatcaaaagaaattaaggatgaagatgtcgaaagtgttgttaaatcagcattgactaaaagcattactcctgaaagagaagttatttcattgattccgcttgaattcattgtagatggtttccaagggattagagaccctagagggatgatggggattcgccttgagatgcgtggtcttatctatactggaccaacaactatccttcataatcttcgtaaaactgttgaacgagcaggtataaaagtagagcatgttgtgatcgcccctctagccttagcaaaatcagttctaaacgaaggtgaacgtgagtttggtgcaactgtgattgatatgggaggcggacaaacaacagtcgcttctatgcgtaatcaagaattgcaatatactaatatttattctgaaggtagcgattatgttaccaaagatatttctaaagtgctacgtacaacagtagaaatcgccgaagcattgaaattcaactttggacaagctaatgttgaagaagcaagtacttctgatacagttcaagttaatgttgttggtaacgaggaacctgttgaaattacagaaagctatctttcgcaaattatttcaggacgtattcgtcaaattttagaacatgtcaaacaagacttgggtagaggtcgtttacttgatttacctggtggtattattcttgttggaggtggtgcaattatgccaggagttgtcgaggttgctcaacaaatttttggaactagagttaaattgcacgttccaaaccaagtaggtattcgcaatccaatgtttgctaatgttattagtatcgttgattatgtaggaatgatgtcagaagttgacattatcgcacaacatgctgtaactggcgacgaaatgctaagacataaaccagtcgactttgattataaagaaaaaacaaatacaatgtcgacaatgccttattctgagccgttaacctcttctatggaagattctaatttagaaccaatccgagcaagagaaaacgctcaagagcctactgagcctaaagctaatattggtgagcgcatcagaggaatttttggaagtatgtttgac

SEQ ID NO: 18 - protein, 429 aa, Streptococcus agalactiae
MNVIGVSNVPSSGVKDGIIIDIEAAATAIKEAVKQAEEKAGITIDKINVGLPANLLQIEPTQGMIPVPNESKEIKDEDVESVVKSALTKSITPEREVISLIPLEFIVDGFQGIRDPRGMMGIRLEMRGLIYTGPTTILHNLRKTVERAGIKVEHVVIAPLALAKSVLNEGEREFGATVIDMGGGQTTVASMRNQELQYTNIYSEGSDYVTKDISKVLRTTVEIAEALKFNFGQANVEEASTSDTVQVNVVGNEEPVEITESYLSQIISGRIRQILEHVKQDLGRGRLLDLPGGIILVGGGAIMPGVVEVAQQIFGTRVKLHVPNQVGIRNPMFANVISIVDYVGMMSEVDIIAQHAVTGDEMLRHKPVDFDYKEKTNTMSTMPYSEPLTSSMEDSNLEPIRARENAQEPTEPKANIGERIRGIFGSMFD

SEQ ID NO: 19 - DNA, 780 bp, Streptococcus agalactiae
atgggaagtctgattctcttatttccgattgtgagccaggtaagttactaccttgcttcgcatcaaaatattaatcaatttaagcgggaagtcgctaagattgatactaatacggttgaacgacgcatcgctttagctaatgcttacaatgagacgttatcaaggaatcccttgcttatagacccttttaccagtaagcaaaaagaaggtttgagagagtatgctcgtatgcttgaagttcatgagcaaataggtcatgtggcaatcccaagtattggggttgatattccaatttatgctggaacatccgaaactgtgcttcagaaaggtagtgggcatttggagggaaccagtcttccagtgggaggtttgtcaacccattcagtactaactgcccaccgtggcttgccaacagctaggctatttaccgacttaaataaagttaaaaaaggccagattttctatgtgacgaacatcaaggaaacacttgcctacaaagtcgtgtctatcaaagttgtggatccaacagctttaagtgaggttaagattgtcaatggtaaggattatataaccttgctgacttgcacaccttacatgatcaatagtcatcgtctcttggtaaaaggagagcgtattccttatgattctaccgaggcggaaaagcacaaagaacaaaccgtacaagattatcgtttgtcactagtgttgaagatactactagtattattaattggactcttcatcgtgataatgatgagaagatggatgcaacatcgtcaa

SEQ ID NO: 20 - protein, 260 aa, Streptococcus agalactiae
MGSLILLFPIVSQVSYYLASHQNINQFKREVAKIDTNTVERRIALANAYNETLSRNPLLIDPFTSKQKEGLREYARMLEVHEQIGHVAIPSIGVDIPIYAGTSETVLQKGSGHLEGTSLPVGGLSTHSVLTAHRGLPTARLFTDLNKVKKGQIFYVTNIKETLAYKVVSIKVVDPTALSEVKIVNGKDYITLLTCTPYMINSHRLLVKGERIPYDSTEAEKHKEQTVQDYRLSLVLKILLVLLIGLFIVIMMRRWMQHRQ

SEQ ID NO: 21 - DNA, 3186 bp, Streptococcus agalactiae
atggacaacaataaaccttacttaagtcccaaagataagactactgtagagaagttagaagatcgctggaaaaaaattactttcaaagttcaggatactggcattggtttgaaagacgtttatcttcaatctgttaagtatgttggtggtggcaataataatttagaccttatcacacctccaggatttaaaaaagaagataaaaaagttgaaaaaccaaaattagaccgtccaccaggaattgatttaccagcaccaacttcaatgagaagttttgattattcaaccccaccgggaactaagccaagcaaacccaaagatagtttatcaactcctccaggtttcccagatttaaacacgccgccggatgaagcaccaaaggatagtaaaaaagacgctattgaagataaatcaggagcaattaaatatgctaagtctcttcaacttagctttgttgatggccctattttagctagcaaagtaaatggcaaaatattacaagtcgaatctgatggcaaattagtcattcctagaaatgctttgtcagctaatcaatttgatgacactagtcttaaaatttatcgtaataataatcgcaataaagaaattactatcacaacagattattttgcagatacaaaatatgtcaatatcacagcggttgactatttgagcaatactacttttgagcaattagctactggtgaaacagtagattaccatgccattgtattttcaagctttgctgctattaaagacaagggtggtaagatttatgttaacgataaattgcaagaaacttctcgtatagcgcttaaagataaatctgttaagattggtattgaattaccaaatgatgtcagacatattgatagtttatctgttcgtcgtttgaatgaggttaaaactgttgataatatcttgaaaaatgatgaacaagacattaatctcagcaaaacttaccaattaaaatacaacccgacaaatcgtcgtctagagtttactattaataacattaactcaagttcagaaatcatgaccactttcaaagatggaaagatgccagaattggttgaacaaaaagatgtttctttggatataaacgatatggacatgagtaagtttaaaactattcgacttggacgaaaggattctgaatttaagggacaacttattgcaaaaactggaacagttgaattagatatgtttttcaaacaatctcaagacccagcttcaattattaaaaaaatataccttatccaaaatggtgttccaaatgaattgaaaaaatttgactctagttttggtttaactgaaagtcagatagatggatactatatttataaagatgcaattaaccttaaatttaaattaaccagtggtgcaagtcttaaagttgtttataaagggcaagaagatccatatagtcatcagaaagaagatatgactaaaaaaggtgaacagctcagtcattcaactcaagccaatgaaaatacagcaaaagtaacctttgctaatattgactggtcacattatagtaaggttactgtgaatggaaaagaagttgttaaaggtagtgagttacctttaactaaaggatggacaacatttgtattacataaaacagaaaattcattaaatgttaaaagtttgattatggagacgggtagtgtaagtaagaaagttcaacaacttcctttaagtcctagattatctaaaaataagcatatgagggatatgctacttactatgcaaaaagattcagcgtattacgaaacaagtgacagtctagtccttcgaattaatctcactgcagatactaaacttaattttaatgctgttaaaggagcgagtgctcttactgaaaatatgatgatgagacagtttgcagttgctggaccacaagatgatcctgttagtgaacataaatacccatcagtatttctcttaactcctgccttattggaaactgctagtgaggcaactctaaatggtaaggaaatcacagcatctggtattatcggtcacatcaaggatggtgataaaagcaagcatgttgaagtcaaaatggtgaatgaaaatggagacatgctaggaacccctgttattattcaaggtaaagacttgactaatcgaacaaaaccattaatgagtggacgtagagtactttatgccggtaaacaatatgagttccgggctaaattaccacttagtcgttttaacacttggattagggttgaagtggtaacagaagcaggagagaaagcaagtattgttcgtcgcatgttctttgaccaatcagttccagagcttaacacagcagttgctaaacgtgatttgacttctgatactgctcttatccacatcgttgccaaagatgactctctaaaactaaaattatatcaagatgattcattacttgaatctgttgataaaaccggtctttatagttttagaaatggtgtagaaatcactaaagatatgacagtaccactagaatttggagataatattattaagttatctgctgttgacttatcaaattatcgtcgtaatgagacccttcatatctatagaaaccgttttgatgttaaagcaagccaaatgacagctgacaaaggagctaaagtaactgtggatatgttgatgaagcacttagttgttccagaaatggcaggagcttatacattaacaatcgacgaagctccaaacacaaatgaatcaggaatgttaacaaacgctaaagtatcgattcattatgtaaatggtggtgttgataaagttgatgttccgattaaagtagttgacttagaagctattcgtaaagctgaagaagcacgtaaagctgaagaagcacgtaaagctgaagaagcacgtaaagctgaagagggacataaaacccaagaagcacctatagttgaagaaggctacaaggttaataacgttcatcaaactgatactacagttaaagcgtctgatttaccaaagactaagacagtttccgcagttcatatggctagaacagacaataaacagataacttcacatcagacacatgttgaaaaacaaattaaaaatacattgccatccactggtgacagcaaacgtggttattatatcactggaatggctatcgttatgctgagtgtattatttagtttagctaaaaagtttaaaagcaaatat

SEQ ID NO: 22 - protein, 1062 aa, Streptococcus agalactiae
MDNNKPYLSPKDKTTVEKLEDRWKKITFKVQDTGIGLKDVYLQSVKYVGGGNNNLDLITPPGFKKEDKKVEKPKLDRPPGIDLPAPTSMRSFDYSTPPGTKPSKPKDSLSTPPGFPDLNTPPDEAPKDSKKDAIEDKSGAIKYAKSLQLSFVDGPILASKVNGKILQVESDGKLVIPRNALSANQFDDTSLKIYRNNNRNKEITITTDYFADTKYVNITAVDYLSNTTFEQLATGETVDYHAIVFSSFAAIKDKGGKIYVNDKLQETSRIALKDKSVKIGIELPNDVRHIDSLSVRRLNEVKTVDNILKNDEQDINLSKTYQLKYNPTNRRLEFTINNINSSSEIMTTFKDGKMPELVEQKDVSLDINDMDMSKFKTIRLGRKDSEFKGQLIAKTGTVELDMFFKQSQDPASIIKKIYLIQNGVPNELKKFDSSFGLTESQIDGYYIYKDAINLKFKLTSGASLKVVYKGQEDPYSHQKEDMTKKGEQLSHSTQANENTAKVTFANIDWSHYSKVTVNGKEVVKGSELPLTKGWTTFVLHKTENSLNVKSLIMETGSVSKKVQQLPLSPRLSKNKHMRDMLLTMQKDSAYYETSDSLVLRINLTADTKLNFNAVKGASALTENMMMRQFAVAGPQDDPVSEHKYPSVFLLTPALLETASEATLNGKEITASGIIGHIKDGDKSKHVEVKMVNENGDMLGTPVIIQGKDLTNRTKPLMSGRRVLYAGKQYEFRAKLPLSRFNTWIRVEVVTEAGEKASIVRRMFFDQSVPELNTAVAKRDLTSDTALIHIVAKDDSLKLKLYQDDSLLESVDKTGLYSFRNGVEITKDMTVPLEFGDNIIKLSAVDLSNYRRNETLHIYRNRFDVKASQMTADKGAKVTVDMLMKHLVVPEMAGAYTLTIDEAPNTNESGMLTNAKVSIHYVNGGVDKVDVPIKVVDLEAIRKAEEARKAEEARKAEEARKAEEGHKTQEAPIVEEGYKVNNVHQTDTTVKASDLPKTKTVSAVHMARTDNKQITSHQTHVEKQIKNTLPSTGDSKRGYYITGMAIVMLSVLFSLAKKFKSKY

SEQ ID NO: 23 - DNA, 1416 bp, Streptococcus agalactiae
atgggagttagtggtttagctgttctactagcactttctcgtaaaaaagagaaagagttaaaacagttagctattttttgttttgatgatactgtccactttggacgaggaattccttttcaagaagacgttgactcagctttaatcaattccccaatcaacgatatttcatttgattatcgccatatgtctgacttcatggattggttagaagaaaattactatgacacaaatctaacctatgtatcaaggacactttacggacaatacctttcagaaagaactaagttacttttagataaactccctgtcacggttattaaaacaagagtggataaactaaactatttatcagatgagcaacaatggcaagtctatattcaagataagctttttcctgtcacatttgatgaattacacttagcttgtggtgctctgcctgttatagaaccttatcatttggaagggaagaccgattatatcaaagacccttatcctatcaaatacttggctcaggaaaattggaagggaaaaacagttgctatcatcgggactggtctagctgcaattgatgttataaaatggttgctactcaatacacaatcttctgttaaagcattttcaagaaccaactacttccctagcgtccgtattgttaatgatttaccacttacttggcacttttttaccaatgataaccttaaagcatttctatcacatccttcaaaaaccttcactattgccgattttaatgatttgatgtctggcgaattggagcatcttggctttaaaaactggaaaaatacaacagaaacttttttatccccaggaattgatggtctcaagttagcctttaaataccctaagcaactctatctattacaacaattagcttcacgaatcactgtctggttaactgacctttggccactcatgtcattatcagataagaaagagtataaagcactctatggaaaagcgattattaacttgcgaaatcctatgcctgatgaatctgctaaagtaattttgaaagctgcacaaaaagggactttttctctgatcaataacgtcaagacaattacaaaaaatgacgaaggattttcaatagaaaaagaaaaacaaaatcatatatctgtcgatcgcgtcattaacgctactggttaccagttaaacactaaaaactggacaaaagccaatccacttctaaaatcgctcatcaatcaagaattttgtcaaattgacgatcaaggagggattactattttaactgaaaatgcacaagttttgtctccaaaatatggtccaatgccaggtttatatgcgcatggtgcactggttaatggtgtcgtttatcagaataactctacaattaaaattcaacaaatggcagagcgagccttttctgataataaa

SEQ ID NO: 24 - protein, 472 aa, Streptococcus agalactiae
MGVSGLAVLLALSRKKEKELKQLAIFCFDDTVHFGRGIPFQEDVDSALINSPINDISFDYRHMSDFMDWLEENYYDTNLTYVSRTLYGQYLSERTKLLLDKLPVTVIKTRVDKLNYLSDEQQWQVYIQDKLFPVTFDELHLACGALPVIEPYHLEGKTDYIKDPYPIKYLAQENWKGKTVAIIGTGLAAIDVIKWLLLNTQSSVKAFSRTNYFPSVRIVNDLPLTWHFFTNDNLKAFLSHPSKTFTIADFNDLMSGELEHLGFKNWKNTTETFLSPGIDGLKLAFKYPKQLYLLQQLASRITVWLTDLWPLMSLSDKKEYKALYGKAIINLRNPMPDESAKVILKAAQKGTFSLINNVKTITKNDEGFSIEKEKQNHISVDRVINATGYQLNTKNWTKANPLLKSLINQEFCQIDDQGGITILTENAQVLSPKYGPMPGLYAHGALVNGVVYQNNSTIKIQQMAERAFSDNK

SEQ ID NO: 25 - DNA, 189 bp, Streptococcus agalactiae
atggcatctagtggttggaaatatgtattaaaacaaatcggtctaatagtattagtcatactattagccttgctgtttttagcggttggattgatgttgggttatagtgtttttggtgacggagagcatgcttactctattttatcgctggataaatggcaaaatattattggaaaatttttaggaaaa

SEQ ID NO: 26 - protein, 63 aa, Streptococcus agalactiae
MASSGWKYVLKQIGLIVLVILLALLFLAVGLMLGYSVFGDGEHAYSILSLDKWQNIIGKFLGK

SEQ ID NO: 27 - DNA, 654 bp, Streptococcus agalactiae
atgaaggataagttattagtagttttaacttggatttggattatatcgttagcaactctagctacaatttatattgcttggttgatctatcctatagaaattcagtttttaaaattagaaaaggttgtgtatttaaaggctgaaacaatttattataattttaataagttgatgatatatctgactcatccttttatctctgatttaaatatgcccagctttccttcttcagaggatggtttaaagcattttgcggatgtaaaatatctttttactctagcgcatgggctttttgttatactaacttttccagttatttattttttaagacgtggatggaagcaaaaaagtatctttctatatgaaggctttttcaagatagctattatgttgcctatttttattgtagtatgtgcctttctgttgggttttgaccagtttttcactctatttcatgaggtgctttttccaggagattctacttggcaatttaatcctctaacggatccagtaatttggatacttcctgaaacttttttcctccattgtttcatcatttttttgttaatctatgaaacaataactataattcttttgataataggtagaaaacatttaaaattaagaaaatataaaaacaaaatgcaagcctta

SEQ ID NO: 28 - protein, 218 aa, Streptococcus agalactiae
MKDKLLVVLTWIWIISLATLATIYIAWLIYPIEIQFLKLEKVVYLKAETIYYNFNKLMIYLTHPFISDLNMPSFPSSEDGLKHFADVKYLFTLAHGLFVILTFPVIYFLRRGWKQKSIFLYEGFFKIAIMLPIFIVVCAFLLGFDQFFTLFHEVLFPGDSTWQFNPLTDPVIWILPETFFLHCFIIFLLIYETITIILLIIGRKHLKLRKYKNKMQAL

SEQ ID NO: 29 - DNA, 828 bp, Streptococcus agalactiae
ttgactcacaaaaatatattattaaccattatatttggattatttatgattatattatcagcatgtggtatgtctaataaggaaatggctggtattgataattgggaacattatcaaaaggaaaagaaaattactattggatttgataatacttttgttcctatgggatttgaaagtcgttctggtgactataccggctttgatattgatttagctaatgctgtttttaaagaatacggtatttcagtgaaatggcagcctattaactgggatatgaaagaaactgaacttaataatggtaatatagaccttatttggaatggttattcaaaaacggcagaacgtgctaaaaaagtcgcttttacaaacccatatatgaataatcatcaagtaattgttactaaaacttcatcacatattaatagtattaaggatatgaaggggaaaaaactaggagcccagtcgggttcatctggttttgatgcttttaacgctaaacctgatattttaaaaaagtttgtaaaaggaaaagaagcagttcaatacgatactttcactcaggctttgattgatttaaaaaataaccgtattgatggtcttttgattgatgaagtttatgctaactattatttaaagcaagaaggaaatataaaagcttattattttgttaaaactgcttatcaaggagaaaattttgtagtaggagctcgtaaagttgatcgtagactaattgaaaagattaacaaagctttcaaacagcttcataataaggggagatttcaaaaaatctcttacaaatggtttggtgaagatgtttatagtaaagaa

SEQ ID NO: 30 - protein, 276 aa, Streptococcus agalactiae
MTHKNILLTIIFGLFMIILSACGMSNKEMAGIDNWEHYQKEKKITIGFDNTFVPMGFESRSGDYTGFDIDLANAVFKEYGISVKWQPINWDMKETELNNGNIDLIWNGYSKTAERAKKVAFTNPYMNNHQVIVTKTSSHINSIKDMKGKKLGAQSGSSGFDAFNAKPDILKKFVKGKEAVQYDTFTQALIDLKNNRIDGLLIDEVYANYYLKQEGNIKAYYFVKTAYQGENFVVGARKVDRRLIEKINKAFKQLHNKGRFQKISYKWFGEDVYSKE

SEQ ID NO: 31 - DNA, 954 bp, Streptococcus agalactiae
ttgagtttaacaacgatttttgcattgctattttcatcaatgctaatttacgcaacacctcttatctttacaagtattgggggaaccttctctgaacgtggtggtatcgtcaacgttggtttagaaggaattatggtaattggagctttctcaggcgttgtatttaatttagagtttgcttctgtttttggtgatgcgactccatggatttctgtactagttggtggtttagttggtttaattttttctgttatccatgcagttgcgacagttaattttcgtgcagatcatattatcagcggaaccgttcttaatttaatggcaccttcattagctgttttcttgattaaggttctttataataaaggtcaaactgataatattcaagaatcatttggaaaatttaatttccctatactatcagatattccttttgttggtgatatcttctttaaaggaacaagcttagtcggttatattgctattcttttctcattccttgcttggtttattctatataaaactcgctttggattaagattacgctcagttggagaacatcctcaagcagcagacaccttaggtattaatgtttatcttatgcgttactctggtgtcttgatttcaggtttccttggtggaataggaggagctgtatatgctcaatctatttctgttaactttgcagcgacaactatattaggaccgggctttatctccttagcggcgatgatttttggtaagtggaatccaattggtgcaatgcttgctagtctattctttggtttatcgcaaagtttagcagttatcggtagccatttaccacttttgagcaatattccaacagtttatctacaaattgctccatatgtcctcactatcattgtattagcagctttctttggacaagcagtagctcctaaggcggatggtattaattatattaaaacgaaa

SEQ ID NO: 32 - protein, 318 aa, Streptococcus agalactiae
MSLTTIFALLFSSMLIYATPLIFTSIGGTFSERGGIVNVGLEGIMVIGAFSGVVFNLEFASVFGDATPWISVLVGGLVGLIFSVIHAVATVNFRADHIISGTVLNLMAPSLAVFLIKVLYNKGQTDNIQESFGKFNFPILSDIPFVGDIFFKGTSLVGYIAILFSFLAWFILYKTRFGLRLRSVGEHPQAADTLGINVYLMRYSGVLISGFLGGIGGAVYAQSISVNFAATTILGPGFISLAAMIFGKWNPIGAMLASLFFGLSQSLAVIGSHLPLLSNIPTVYLQIAPYVLTIIVLAAFFGQAVAPKADGINYIKTK

SEQ ID NO: 33 - DNA, 846 bp, Streptococcus agalactiae
atgtcagatttattggaatggcaagatctagcgcagttacctgtatctatttttaaagactatgttacagatgctcaagacgcggaaaaaccttttatatggacagaagtatttttaagggagattaatcgctcaaatcaagaaattattttgcatatttggccgatgactaagacagtcattctggggatgttagatcgagaattaccacatttagaattagctaaaaaagaaatcatcagtcgtggctatgaaccagttgttcggaattttggtggtctcgcagttgtagctgatgaaggaattttaaatttttcattggttattccagatgtttttgagagaaaattgtctatctcagatgggtatcttataatggtcgattttattagaagtatattttcagatttttatcaacctattgagcactttgaagtagagacctcctattgtcctggtaagtttgatcttagtataaatggcaaaaaatttgctggcttggctcagcgccgtataaagaatggtattgcggtatcaatttaccttagcgtttgtggcgatcaaaaagggcggagtcaaatgatttcagatttttataagattggtctaggtgatacgggtagtccaattgcttatccaaatgtagatcctgaaattatggctaatctatctgatctattagattgtcctatgacagtagaagatgttattgatcgtatgttgattagccttaaacaagtaggttttaatgatcgtttactgatgattagacccgatttagttgcagagtttaatagatttcaggctaagtctatggctaataaggggatggtgagcagagatgaa

SEQ ID NO: 34 - protein, 282 aa, Streptococcus agalactiae
MSDLLEWQDLAQLPVSIFKDYVTDAQDAEKPFIWTEVFLREINRSNQEIILHIWPMTKTVILGMLDRELPHLELAKKEIISRGYEPVVRNFGGLAVVADEGILNFSLVIPDVFERKLSISDGYLIMVDFIRSIFSDFYQPIEHFEVETSYCPGKFDLSINGKKFAGLAQRRIKNGIAVSIYLSVCGDQKGRSQMISDFYKIGLGDTGSPIAYPNVDPEIMANLSDLLDCPMTVEDVIDRMLISLKQVGFNDRLLMIRPDLVAEFNRFQAKSMANKGMVSRDE

SEQ ID NO: 35 - DNA, 1998 bp, Streptococcus agalactiae
atgcaacatgtcaatcattcttcttttgataaagcatcaaaagcaggatttattattgctttaggcattgtttatggagatattggtacaagcccactctatacaatgcaatcattggttgaaaaccaaggtggtatttctagtgttacagaatcgtttatcttaggttctatatctttaatcatatggactctgacacttattacaactatcaagtatgtgcttgtagctttaaaggcggataatcaccacgaaggtggtattttttctttatatacccttgttcgaaaaatgacaccttggttaattgtgccagctgttattggaggtgcaaccttgttgtcagatggagctttgacgccagctgtaaccgtaacttcagccgttgagggattaaaagtagttcctagtttgcagcatattttccagaatcagagtaacgttatttttgcgaccttgtttattttactgttactttttgccatccaaaggtttggaacgggtgtgattgggaaattatttgggccaattatgtttatatggtttgcctttttaggtattagcggtctccttaatagttttgcccatccagaagttttcaaagcaattaatccatactacggtttgaaattgttatttagtccagagaatcataaaggtatttttattttaggatctattttcctggcgacaacgggggcagaagcactatactctgacttaggtcatgttgggcgtggaaatatacatgtttcatggccgttcgttaaggttgccattatactttcttattgtgggcaaggggcatggattttagctaataagaacgcaggaaatgaattgaatcccttttttgctagtatcccttcgcaatttacaatgcatgtcgttattttagctactttggcagctatcatcgcttcacaggcactgatttctggatcatttaccttagtttctgaagctatgcgactaaaaatattcccgcaatttcgttcaacttatcctggtgacaatattggtcaaacctacatacctgttattaattggttcttatttgccattacaacctctattgttttgctttttaagacttcagcgcacatggaagcagcatatggattagcgataacaattacgatgctaatgacaactattttactgtctttctttttaattcaaaaaggagtaaaaagaggtttagtcttattgatgatgattttctttggtattttagagggaatcttcttccttgcttcagctgttaaatttatgcatggaggctatgttgttgttattatagcagtagcaattatattcatcatgactatctggtataaaggtagtaaaattgtttcgcgttatgttaagttgttggatttaaaagattacatcggacaattagataaacttagacatgatcatcgttatccgatttatcatactaacgttgtttatttgacaaatcgtatggaagaagacatgattgataagtctatcatgtattctatccttgataagcgccctaaaaaagcacaagtttattggtttgtaaacattaaggtcactgatgaaccttatacagctgagtataaagttgacatgatgggaacagacttcattgtgaaggtagaactttaccttggatttaagatgcgtcagactgtgtcacgctatcttcgtacgattgtagaagaattacttgaaagtggacgtctgcctaaacaaggaaagacatacagcgttagacctgatagtaacgtaggagattttaggtttattgtccttgatgaacgtttctcaagtagtcaaaacctaaaacctggtgaacgatttgttatgctaatgaaatcatctataaagcattggacagcaacaccaatacgatggtttggtctacaattttccgaagttacaacagaagtagttcctttgatttttacagctaatcgaggtctaccaattaaagaaaaaagtgaacttacaacaactggagat

SEQ ID NO: 36 - protein, 666 aa, Streptococcus agalactiae
MQHVNHSSFDKASKAGFIIALGIVYGDIGTSPLYTMQSLVENQGGISSVTESFILGSISLIIWTLTLITTIKYVLVALKADNHHEGGIFSLYTLVRKMTPWLIVPAVIGGATLLSDGALTPAVTVTSAVEGLKVVPSLQHIFQNQSNVIFATLFILLLLFAIQRFGTGVIGKLFGPIMFIWFAFLGISGLLNSFAHPEVFKAINPYYGLKLLFSPENHKGIFILGSIFLATTGAEALYSDLGHVGRGNIHVSWPFVKVAIILSYCGQGAWILANKNAGNELNPFFASIPSQFTMHVVILATLAAIIASQALISGSFTLVSEAMRLKIFPQFRSTYPGDNIGQTYIPVINWFLFAITTSIVLLFKTSAHMEAAYGLAITITMLMTTILLSFFLIQKGVKRGLVLLMMIFFGILEGIFFLASAVKFMHGGYVVVIIAVAIIFIMTIWYKGSKIVSRYVKLLDLKDYIGQLDKLRHDHRYPIYHTNVVYLTNRMEEDMIDKSIMYSILDKRPKKAQVYWFVNIKVTDEPYTAEYKVDMMGTDFIVKVELYLGFKMRQTVSRYLRTIVEELLESGRLPKQGKTYSVRPDSNVGDFRFIVLDERFSSSQNLKPGERFVMLMKSSIKHWTATPIRWFGLQFSEVTTEVVPLIFTANRGLPIKEKSELTTTGD

SEQ ID NO: 37 - DNA, 834 bp, Streptococcus agalactiae
atgacacagatgaattttacagatagagcaacacgtgttgctataattgctaacgggaaatatcaaagcaagcgtgtagcctcaaagctctttgctgcttttaaacatgatcctgatttttatttatcaaaaaaggatcctgatattgtcatttctattggtggagatggtatgcttttgtcagccttccacatgtacgaaaaacaactggataaagtaaggtttgtcggtgttcatacaggacatttagggttttatacagactatcgagattttgaagttgacacattaattaataatttgaaaaatgataaaggtgaacaaatctcctatcccattttgaaagtaactattacccttgaagatggtcgagttattcgtgcgcgtgctttaaatgagtctactattaagcgtattgaaaaaacaatggtagcggatgttgttattaatcaagtggtatttgaaaggtttaggggagatggcattttagtttctacaccaaccggtagtactgcttacaataaatcactagggggggcagtactccacccaacgatagaagccttgcaactaacagaaatttctagtcttaataatcgcgtctatcgtaccttggggtcatcggttatcatccccaaaaaagatgctatagagatagttcctaaacgagttggtgtctatacaatttctatagataacaaaacagtccattacaagaatgttaccaaaatagaatatagtattgacgaaaaaagtattaactttgtttcaactccaagtcacactagtttttgggaacgtgttaacgatgcttttatcggagaacctgaacat

SEQ ID NO: 38 - protein, 278 aa, Streptococcus agalactiae
MTQMNFTDRATRVAIIANGKYQSKRVASKLFAAFKHDPDFYLSKKDPDIVISIGGDGMLLSAFHMYEKQLDKVRFVGVHTGHLGFYTDYRDFEVDTLINNLKNDKGEQISYPILKVTITLEDGRVIRARALNESTIKRIEKTMVADVVINQVVFERFRGDGILVSTPTGSTAYNKSLGGAVLHPTIEALQLTEISSLNNRVYRTLGSSVIIPKKDAIEIVPKRVGVYTISIDNKTVHYKNVTKIEYSIDEKSINFVSTPSHTSFWERVNDAFIGEPEH

SEQ ID NO: 39 - DNA, 942 bp, Streptococcus agalactiae
atgggaagatttaaagaacttttagagagtaaaaaaactctcatcctacatggtgccttggggaccgagcttgagagtagaggttgtgatgtttctgggaaactttggtcagccaaatatctgattgaggatccagcagctattcagaccattcatgaagattatattcgtgctggcgctgatattgtgacgacatcaacttatcaggcgactttacaaggactagctcaagttggtgtctctgaaagtcagacagaagatttgattcgcttgactgttcagttggcaaaagctgcgcgtgagcaagtttggaaaagtttgacaaaagaagaaaaatcagagagaatctatcctttgatttctggggatgttggtccctacgctgcctttttagcggatggctctgagtacactggactctacgatattgataagcaaggtcttaaaaacttccatcgccatcgtattgagcttcttttagatgagggtgttgacattctggcacttgaaaccattccaaacgctcaggaggctgaggctcttattgagctacttgccgaggatttccctcaggttgaggcttatatgtcattcacctctcaagatggtaagaccatctcagatggtagtgctgttgcagacttggcgaaagctattgatgttagcccacaggtcgtggcgctgggcattaactgttcaagtccatcgttagttgctgatttcttgcaagcaatagcagagcagactaacaagcctcttgtgacctatccaaactctggagaggtttatgatggggcaagccaatcttggcaatctagccctgatcattcacacaccctacttgaaaatacaagtgactggcaaaaacttggcgcccaagttgtcggaggttgttgccgaactagaccagctgatattgctgacctctctgcacatttaaaa

SEQ ID NO: 40 - protein, 314 aa, Streptococcus agalactiae
MGRFKELLESKKTLILHGALGTELESRGCDVSGKLWSAKYLIEDPAAIQTIHEDYIRAGADIVTTSTYQATLQGLAQVGVSESQTEDLIRLTVQLAKAAREQVWKSLTKEEKSERIYPLISGDVGPYAAFLADGSEYTGLYDIDKQGLKNFHRHRIELLLDEGVDILALETIPNAQEAEALIELLAEDFPQVEAYMSFTSQDGKTISDGSAVADLAKAIDVSPQVVALGINCSSPSLVADFLQAIAEQTNKPLVTYPNSGEVYDGASQSWQSSPDHSHTLLENTSDWQKLGAQVVGGCCRTRPADIADLSAHLK

SEQ ID NO: 41 - DNA, 720 bp, Streptococcus agalactiae
atgatgaatattggagttatttttgcaggtggtgttggtcgtcgcatgaataccaaaggtaaaccaaagcaattcctagaagtgcatggtaaacccattattgtacacacaattgatattttccaaaatacagaagctattgatgctgtagtagttgtctgtgtatcagactggctagattatatgaataatctggtagagcgtttcaaccttacgaaagtaaaagcagttgttgcaggtggagaaactggccaaatgtcaatttttaaggggcttgaagccgctgaacagctggctacagatgatgccgttgttttaattcatgacggagtacgtccattgattaatgaagaagttattaatgctaatatacagtcagtaaaagaaacaggaagtgcggtaacttcagttcgtgctaaagagacagttgttctagtcaatgattcttctaaaatatctgaagttgttgatcgtactcgttccttcattgctaaagcgccacaaagtttttatctatcagatatcctttctgttgaacgtgatgccattagcaaagggattactgatgcaattgattctagtactttgatgggtatgtacaatcgtgaactcactattgttgagggaccatatgaaaatatcaagataacaacaccagatgatttttatatgtttaaagctttgtatgatgctagagaaaatgaacaaatttatgggatg

SEQ ID NO: 42 - protein, 240 aa, Streptococcus agalactiae
MMNIGVIFAGGVGRRMNTKGKPKQFLEVHGKPIIVHTIDIFQNTEAIDAVVVVCVSDWLDYMNNLVERFNLTKVKAVVAGGETGQMSIFKGLEAAEQLATDDAVVLIHDGVRPLINEEVINANIQSVKETGSAVTSVRAKETVVLVNDSSKISEVVDRTRSFIAKAPQSFYLSDILSVERDAISKGITDAIDSSTLMGMYNRELTIVEGPYENIKITTPDDFYMFKALYDARENEQIYGM

SEQ ID NO: 43 - DNA, 585 bp, Streptococcus agalactiae
atgacaaaaataataggactgacaggagggatagcttctggaaagtcaacggtaacaaaaataatacgagaatcaggttttaaagtcatagatgcggatcaagtggttcataaattgcaagctaagggtgggaaactttaccaagctttattagaatggttgggtcccgagatacttgatgctgatggtgagttggatagaccaaagctttctcaaatgatttttgctaatccagacaatatgaagacatcagctaggctacaaaatagtatcattcgtcaagagttagcatgtcagcgcgaccaattaaaacaaacagaagagatatttttcatggatattcctttattgattgaagaaaagtatataaaatggtttgatgagatttggttggtatttgttgataaagaaaaacaattacaacgattaatggcccgtaacaactacagtcgagaagaagcagaattacgactttcacaccaaatgcctttaacagataaaaaaagtttcgctagtcttattattgacaataatggtgatttaataactttaaaagagcaaatattggatgctcttcaacgttta

SEQ ID NO: 44 - protein, 195 aa, Streptococcus agalactiae
MTKIIGLTGGIASGKSTVTKIIRESGFKVIDADQVVHKLQAKGGKLYQALLEWLGPEILDADGELDRPKLSQMIFANPDNMKTSARLQNSIIRQELACQRDQLKQTEEIFFMDIPLLIEEKYIKWFDEIWLVFVDKEKQLQRLMARNNYSREEAELRLSHQMPLTDKKSFASLIIDNNGDLITLKEQILDALQRL

SEQ ID NO: 45 - DNA, 1575 bp, Streptococcus agalactiae
atggtgactctgactgcatgccattcacaggatagcaaaagtcataaactaaacagtgataaactcacgcttgcttggggagaagactttggtgatgttaatccgcatcgctataaccctgatcagtttgttatccaggatatggtttatgaggggttggtacgatatggtgacaatgggaaaattgaaccagctttagcgaaaagctggagcattagtcaagatggaaaaacctacacttttaaattgagaaatgctaaatattctgatggcagtaactttaatgctgcgaatgtcaaacgtaattttgatagtattttttcgaagtctaatagaggtaatcataattggtttaatttaacgaatcaattggaaaattatcgtgccttgaatcaaagtacttttgaaattaaactgaaacaagcttatagtgctactttatatgatctctctatgattcgaccaattcgctttttatctgatagcgctttccctaaaggtgatgatacaactaagaagaatgtaaaaaaaccaattggaacgggtcaatgggttgtgaaaagtaaaaagcaaaatgaatatattaccttcaaacgtaatgagaattactggggaaagaaaccaaaattaaaagaagtaaccgtaaaagttatacccgatgctcagacgcgtgctttagcattcgaatcaggtgacgttgatttgatctatgggaatggcattattggtttagacacttttgcccaatatacgaaggacaagaaatatgtcacagctatttctcaacctatgtcaacaagacttttgttgctaaatgctaaggaaagtattttccaagataaaaaagttcgtcaggcaatgaatcatgctattgacaaggtttctattgctaagaacacctttagaggaacagaaaagccagcagacactattttttcaaaatcaacatctcactcagatgctaagttaaatccttatagctataatgttgataaagcaaatcagctattggatcaagctggttggaagatgggaaaagataaggttcgtgaaaaagatggtaaaactctaaccttacgtcttccttatatcgccactaaggcaactgataaagacctggtaacttatttccaaggagaatggcgtaaaatcggtattaatgtttctcttattgctatggaagaagatgattattgggctaatgctaaaaagggtaattttgatatgatgttaacctattcttggggagcaccatgggaccctcatgcttggatgtcggcattaactgccaaggcagatcatggacatccagaaaatatagctttagaaaatctagcaactaaaactgaaatggatagacttattaagtcagctctagtagatcctaaggaagaaaatgttgatagagactataagaaggttcttgaattattgcatgatgaggctgtatatatcccattaacttatcaatcggtgatttctgtttataggaaaggtgattttaaaaccatgcgttttgcgccagaagaaaattcattcccattacgctatatagaaaaaaacaatgtatctaag

SEQ ID NO: 46 - protein, 525 aa, Streptococcus agalactiae
MVTLTACHSQDSKSHKLNSDKLTLAWGEDFGDVNPHRYNPDQFVIQDMVYEGLVRYGDNGKIEPALAKSWSISQDGKTYTFKLRNAKYSDGSNFNAANVKRNFDSIFSKSNRGNHNWFNLTNQLENYRALNQSTFEIKLKQAYSATLYDLSMIRPIRFLSDSAFPKGDDTTKKNVKKPIGTGQWVVKSKKQNEYITFKRNENYWGKKPKLKEVTVKVIPDAQTRALAFESGDVDLIYGNGIIGLDTFAQYTKDKKYVTAISQPMSTRLLLLNAKESIFQDKKVRQAMNHAIDKVSIAKNTFRGTEKPADTIFSKSTSHSDAKLNPYSYNVDKANQLLDQAGWKMGKDKVREKDGKTLTLRLPYIATKATDKDLVTYFQGEWRKIGINVSLIAMEEDDYWANAKKGNFDMMLTYSWGAPWDPHAWMSALTAKADHGHPENIALENLATKTEMDRLIKSALVDPKEENVDRDYKKVLELLHDEAVYIPLTYQSVISVYRKGDFKTMRFAPEENSFPLRYIEKNNVSK

SEQ ID NO: 47 - DNA, 738 bp, Streptococcus agalactiae
atgataaatgatattaataattttattgagagtaagaaattatctctcaattcgcgtaagtcctatcactatgatttaaagcaattttataaaataattggtggacatgtaaattctgaaaaactggcattgtatcaacagtctctaagtgaatttaagttaacagctcgtaagcgaaagttatctgcagtcaatcaatttcttttctttttatataatagaggaacgctgaaggaattttacagactacaagagactgaaaaaatcactttggctcagacaaagtctcaaataatggatttatcaaatttctatcaagatactgattatccgagtggtcgtttgattgctttgttgattttatctttaggtttaactccggctgaaattgctaatttgaagaaggctgattttgatacaacttttaatatcttaagtattgaaaaatcgcagatgaagcgtattttaaaacttccagaagacttgcttccttttcttttggaatctttagaggaagatggtgacttagtctttgagcataacggtaagccttattctagacaatggttttttaatcaattaacagatttcttaaatgagaagaatgagcaacaactaactgcacaacttctgcgagaacaatttattctaaagcaaaaagaaaatggcaaaacgatgacggagctcagtcgccttctaggcttaaaaactcctatcactttagagagatattataga

SEQ ID NO: 48 - protein, 246 aa, Streptococcus agalactiae
MINDINNFIESKKLSLNSRKSYHYDLKQFYKIIGGHVNSEKLALYQQSLSEFKLTARKRKLSAVNQFLFFLYNRGTLKEFYRLQETEKITLAQTKSQIMDLSNFYQDTDYPSGRLIALLILSLGLTPAEIANLKKADFDTTFNILSIEKSQMKRILKLPEDLLPFLLESLEEDGDLVFEHNGKPYSRQWFFNQLTDFLNEKNEQQLTAQLLREQFILKQKENGKTMTELSRLLGLKTPITLERYYR

SEQ ID NO: 49 - DNA, 894 bp, Streptococcus agalactiae
atgaatgaaacactactattacatgggattcagcttattctgattatcgccatgattatcactttttatcagattgttagacatattaggtctcaaaaaataaatcctttcaaacgatttttcactggtttgtggatcggttttgtaactgatgctctcgatactcttggtatcggctcttttgcaacaacgaccacattttttaaactaactaagcttgttgaagacgatcgtaagatacccgcaacaatgacagctgcacacgtacttccagttttgttgcagtcactctgttttatttttgttgtaaaagtagaggctttaacactaataacaatggctggtgcagcttttattggggcttttgttggagctaaaatgactaaaaattggcacgctcctactgttcaacgtattctaggaacactgctcatcacagctgctattattatgctctatcgtatgatcactaaccctggcgctggtatttcagattcagtgcatggtctacacggcatttggttatttgttggtatcggcttcaattttattattggtgtattaatgactatgggactaggtaattatgctcccgaacttatcttcttctccctaatgggactgagtcctgcagttgctatgcctgtcatgatgctagatgcagctatgataatgacagcttctagtacacaatttatcaagagtggtcgtgttaattggaacggctttgccggtctggttactgggggaatattaggcgttattgtcgctgttctcttcttaactaaccttgatcttaacagcttgaaaacactggttgtaggtattgttttatttactggagcaatgttaatacgttcttcctttaaaaaaactatgcccaaaagtcatcat

SEQ ID NO: 50 - protein, 298 aa, Streptococcus agalactiae
MNETLLLHGIQLILIIAMIITFYQIVRHIRSQKINPFKRFFTGLWIGFVTDALDTLGIGSFATTTTFFKLTKLVEDDRKIPATMTAAHVLPVLLQSLCFIFVVKVEALTLITMAGAAFIGAFVGAKMTKNWHAPTVQRILGTLLITAAIIMLYRMITNPGAGISDSVHGLHGIWLFVGIGFNFIIGVLMTMGLGNYAPELIFFSLMGLSPAVAMPVMMLDAAMIMTASSTQFIKSGRVNWNGFAGLVTGGILGVIVAVLFLTNLDLNSLKTLVVGIVLFTGAMLIRSSFKKTMPKSHH

SEQ ID NO: 51 - DNA, 1023 bp, Streptococcus agalactiae
atgttacattttgaaaatgattataataaaggagctcatccagagcttttaaatgcccttattgaaactaatgatcaaggtctatcgggatatgggacagatagttactgtcaacaagcggcagataaaattcgagaagtctgttcctgtccacaagctgaagttgagtttttagtgggtggtactcaaacaaatcaagtagttatcagtagtatgcttgcttcttatgaaggagttattgctgcagaaacaggtcatgtgagtagtcatgaagcaggagccatagaattttcagggcataaggtattgactttaccttctcataatgggaaattactcgcaagcgaagtcgcaacttatattgagactttttatgctgatggtaattaccaacacatggtttttccaggaatggtttatatatcacatccaacagaatatggaacactttatagtaaagcagaactagaagagttatcgaagatttgtaaacattatcaaatccccttatttattgacggtgctcgtctggggtatggtttggctgcgaaagatacagatgttgatttcccaacgattgcagccttatcagatgttttttatattggtggaaccaaaatgggggctcttgctggggaagcagttgttttcacaaagaaaaatcgtccaaaacagtttactacaattgtaaagcagcatggtgcgttattagccaagggaagattgctggggcttgcttttgatcgtttctttacggataacctttacttaaaaattggaaagcatgcgatcgacttagcagaggaattaaaaatcattttagaagaaaaaggttactcattctatttaaaatcaccaactaatcaacaatttattattgtagaaaatacaaaactagcagatttagcaaagaatgtagcttatagtttttgggaaaaatatgatgaccatcatactgtaatacgtctagcaactagttggtcaactagtcgcgaagatgtaactgctttaagaaatgtcttg

SEQ ID NO: 52 - protein, 341 aa, Streptococcus agalactiae
MLHFENDYNKGAHPELLNALIETNDQGLSGYGTDSYCQQAADKIREVCSCPQAEVEFLVGGTQTNQVVISSMLASYEGVIAAETGHVSSHEAGAIEFSGHKVLTLPSHNGKLLASEVATYIETFYADGNYQHMVFPGMVYISHPTEYGTLYSKAELEELSKICKHYQIPLFIDGARLGYGLAAKDTDVDFPTIAALSDVFYIGGTKMGALAGEAVVFTKKNRPKQFTTIVKQHGALLAKGRLLGLAFDRFFTDNLYLKIGKHAIDLAEELKIILEEKGYSFYLKSPTNQQFIIVENTKLADLAKNVAYSFWEKYDDHHTVIRLATSWSTSREDVTALRNVL

SEQ ID NO: 53 - DNA, 1659 bp, Streptococcus agalactiae
atgagttattaccttttttcttttctatttattttgtttttgacacctgtaggcgtgtatagttattactatttagatttgttaaaaatgatggataaaatgtctatgatcagtgtaggtacaggtttgtttttagcattttttgtttcttggtatttgacttggtttttgcaagaagctaatccattatttaataaactagatcgattaaaaagaatgtctaagtttttatatgagaatggctatgtttatgaaaaacgtaaaaaatcaaataagaaaacgaagacaaaatatcgttttccaaaagtttatgtgaaacaaggtaagtatgatttaagtgtttcatttgaaatggctggaggaaaatttcaaaagaaatttaaggatattggtggagaattagaagatacttttttcatggattttatggaaaaaactgatgatccacgctttaaaatttacaaattagcttattcggctttcttatcacgtattacggttaaagatgtgatatggaataaagataagggaattaagttaatggatggctattattgggatttcatcaatgatcctcatttattagttgctggtggtactggtggaggtaaaacagtattactaaggtcaatccttcgttgtcttgcggaaattggagtttgtgatatatgtgaccctaaaagagccgattttgttactatgtcagatttatcagcttttgaaggtagaattgcctttgaaaaggctgatattattgagaagtttgaaaatgctgttacgataatgtttgcacgttatgattttgttcgaaatgaaatgaagcgtttaggtcataaagacatgaaaaagttttatgattatggattggaaccttatttttttgtatgtgatgaatataatgctttaatgagttctttgtcttatcaggaacgtgagattgtagataatgcatttactcaatatatattgttaggacgtcaggttggatgtaatgcgattatagcaatgcaaaagccgtctgcagatgatcttcccactaaaattagatctaatatgatgcaccatatctcggttggtcgtctcgatgatggtggttatgtgatgatgtttggtgatgaaaatagaaataaggaatttaggtttattaaatatcttgcaggtcgtcgtgtttatggtcgaggttattcagctgtttttggtgaagtagcaagagaattttattctcctttattacctaaaaatttctctttttatgatgcttttgaaaaaataaataggcatgagaatccttttgatcctacagaaaatcaggaagtttctaaggcgattcttaaagacgaatctttgagagagtttgtggaaaaaacgtctgaaaatgagttacttaagggttcagtagggtttgattttgatgatgaaatggaggaaatggaaaatatgagtattggtgatttagctaagaaaacaggtttttcatttggtaagattaagaatttaatagatatgattgaaaaagataattatatgacttttagtcgtgaagatgaaaaggttgtattaaatgattctgatgcagtcgtcttagaaagtttactgacacaaaaagatgaatttgagggtagctggaaagagttactattgaattattttaagggtgaa

SEQ ID NO: 54 - protein, 553 aa, Streptococcus agalactiae
MSYYLFSFLFILFLTPVGVYSYYYLDLLKMMDKMSMISVGTGLFLAFFVSWYLTWFLQEANPLFNKLDRLKRMSKFLYENGYVYEKRKKSNKKTKTKYRFPKVYVKQGKYDLSVSFEMAGGKFQKKFKDIGGELEDTFFMDFMEKTDDPRFKIYKLAYSAFLSRITVKDVIWNKDKGIKLMDGYYWDFINDPHLLVAGGTGGGKTVLLRSILRCLAEIGVCDICDPKRADFVTMSDLSAFEGRIAFEKADIIEKFENAVTIMFARYDFVRNEMKRLGHKDMKKFYDYGLEPYFFVCDEYNALMSSLSYQEREIVDNAFTQYILLGRQVGCNAIIAMQKPSADDLPTKIRSNMMHHISVGRLDDGGYVMMFGDENRNKEFRFIKYLAGRRVYGRGYSAVFGEVAREFYSPLLPKNFSFYDAFEKINRHENPFDPTENQEVSKAILKDESLREFVEKTSENELLKGSVGFDFDDEMEEMENMSIGDLAKKTGFSFGKIKNLIDMIEKDNYMTFSREDEKVVLNDSDAVVLESLLTQKDEFEGSWKELLLNYFKGE

SEQ ID NO: 55 - DNA, 2478 bp, Streptococcus agalactiae
gtgtctgctgatcaagttacaactcaagcaacaactcaaacagtaacgcaaaatcaagcagaaacagtaacatcaactcaacttgataaagcagtagctacagctaaaaaagcagctgtagctgttacaaccacagctgcagttaatcatgcgacaactactgatgcacaagctgatttagctaatcaaacacaaacagttaaagatgttactgcaaaagcacaagctaatacacaagctattaaagatgctactgctgaaaatgcaaaaattgacgcagaaaacaaagcagagtctcaacgtgtaagtcagttaaatgcacaaactaaagcaaaaattgatgctgaaaacaaagatgcacaagctaaagcagatgcgactaatgcacaattacaaaaagattatcaagctaaattagcgaaaatcaaatcagttgaagcttataatgcaggtgtacgtcaacgtaataaagatgcacaagctaaagcagatgcgactaacgcacagttacaaaaagactatcaagctaaattagcactttataatcaagctctaaaagctaaagcagaagcagataaacagtctattaataatgttgcttttgatatcaaagctcaagctaaaggtgttgataacgctgaatatggaaactcaatcatgactgcaaaaactaaacctgacggaagtttcgagtttaaccatgatatgatcgatggtgtgaagacaatcggctatgggaaattgacaggtaaagttaatcatcattatgttgctaacaaagatggctctgtgacagcatttgttgactctatcactctttacaagtacgagtatcgtaatgttgctcaaaatgctgctgttaatcaaaatattgctttcagagtcttaactaaagacggacaaatcatttttgagaagaaacataatggtaacaaaacttttgcagaaactttaaacaaaactttacaactcaatcttaaatatgagcttaaaccacatggttctagtggaagcgttgaagtctttaagattcatgatgactgggtacatgacacacatgggtctgctttagtgtcttatgttaataataatgatgttgttcctaacgttgttataccaaaacagccaacaccaccgtcaacagaaaaagtgactcctgaagcagaaaaaccagtacctgaaaaaccagttgagcctaaatttgtaacacctacattaaaaacttacactccagctcaaccaaaagtgaaaccacatgtgtctattcctgaaaagattaactactcagttagtgttcatcctgttttagttccagctgctaatccttcaaaagctgtcattgatgaagcaggtcaatctgttaatggtaaaaccgtattaccaaatgctgaattaaattacgttgctaaacaagactttagccaatataaaggaatgactgcatcacaaggtaaaatagctaaaaactttgtctttattgatgattataaagatgacgcactagatggtaagtctatgaaagtgaactcaatcaaagcatctgatggcacagatgtgtcacaactcttagaaatgcgacatgtgctttctacggatactttagatgagaaacttcaaacgcttattaaagaagcaggaatcagtcctgttggtgagttttacatgtggactgcaaaagatccacaagctttttataaagcttatgttcaaaaaggtctagatgttacttataacttatcatttaaagttaaaaaagagtttactaaaggtcaaattcaaaatggtgttgcacaaatcgactttggcaatggatatacaggtaatattgtagtcaatgatttgacaactccagaaatacataaagatgtgttagacaaagaagatggcaagtctatcaacaatggtactgtcaaattaggtgatgaagttacttacaaattagagggttgggtagttccaacaggtcgttcttatgatctatttgaatacaaatttgtggatcaattacaacgcacacctgatctttacttacgtgataaagtggtcgctaaagttgatgtgacattaaaagatggtacagtcattaaaaaagggactaatttaggagagtacacagaaacagtttacaacaaaaagacaggtctctatgaattagtcttcaagaaagacttccttgaaaaagttgcacgttctagtgaatttggggcagatgattttgtggtggttaaacgtatcaaagcaggtgatgtttacaataccgcagacttttttatcaatgggaataaggttaaaactgaaactgtggtaacacatactcctgagaaaccaaaaccagttgaaccacaaaaagcaactccaaaagctcctgctaaaggattacctcaaactggtgaagcaagcgttgcccctcttacagcacttggagcaatcatcttgtcagctatcggtttagcaggatttaaaaaacgcaaagaaaat

SEQ ID NO: 56 - protein, 826 aa, Streptococcus agalactiae
MSADQVTTQATTQTVTQNQAETVTSTQLDKAVATAKKAAVAVTTTAAVNHATTTDAQADLANQTQTVKDVTAKAQANTQAIKDATAENAKIDAENKAESQRVSQLNAQTKAKIDAENKDAQAKADATNAQLQKDYQAKLAKIKSVEAYNAGVRQRNKDAQAKADATNAQLQKDYQAKLALYNQALKAKAEADKQSINNVAFDIKAQAKGVDNAEYGNSIMTAKTKPDGSFEFNHDMIDGVKTIGYGKLTGKVNHHYVANKDGSVTAFVDSITLYKYEYRNVAQNAAVNQNIAFRVLTKDGQIIFEKKHNGNKTFAETLNKTLQLNLKYELKPHGSSGSVEVFKIHDDWVHDTHGSALVSYVNNNDVVPNVVIPKQPTPPSTEKVTPEAEKPVPEKPVEPKFVTPTLKTYTPAQPKVKPHVSIPEKINYSVSVHPVLVPAANPSKAVIDEAGQSVNGKTVLPNAELNYVAKQDFSQYKGMTASQGKIAKNFVFIDDYKDDALDGKSMKVNSIKASDGTDVSQLLEMRHVLSTDTLDEKLQTLIKEAGISPVGEFYMWTAKDPQAFYKAYVQKGLDVTYNLSFKVKKEFTKGQIQNGVAQIDFGNGYTGNIVVNDLTTPEIHKDVLDKEDGKSINNGTVKLGDEVTYKLEGWVVPTGRSYDLFEYKFVDQLQRTPDLYLRDKVVAKVDVTLKDGTVIKKGTNLGEYTETVYNKKTGLYELVFKKDFLEKVARSSEFGADDFVVVKRIKAGDVYNTADFFINGNKVKTETVVTHTPEKPKPVEPQKATPKAPAKGLPQTGEASVAPLTALGAIILSAIGLAGFKKRKEN

SEQ ID NO: 57 - DNA, 843 bp, Streptococcus agalactiae
atgttgtctgttggtttagttttagagggtggcggaatgagaggtctttatactgctggagttttagatgcttttctagatgcaggaataaaaatagatggtatcgtatctgtctctgctggtgcattgtttggtgttaattttgtatctagacaacgagagagggctttgcgatacaataaaaagtatttatcccaccctaaatatatgagtctaaggtcatggtttcgaacagggaattttgttaataaagatttcacctattatgaagttcctatgaaattggatgtatttgacgatgaagcatttaaaaaatcaagtattgatttttacgtagttgctacagagatgacatctggtaaacctgaatattttaaaattgatagtgtttttgaacaaatggaaattttacgtgctagttcagcattaccagtagtctcaaagatggttgattggcaggggaaaaagtacttagatggtggtttatctgatagtattcccgttgattttgcccgtggtttaggatttgacaagttgattgttgtgatgactaggccgctcaattatcagaaaaagccttcaagtggacgattgtataaaactctgtataggaaatatcctaattttgtaaagacagcctcgaatcggtaccaacagtataataatagtcttgaaaaggtcatgagccttgaaaaaacaggcgatctatttgcaattagaccgagtaagagcttggttattggccgcttagagaagaatccggataaacttgatagtatttatcagcttggtatgaaagatgctaaaagtgtgatgcctgagctgaatagttatctaatgaaa

SEQ ID NO: 58 - protein, 281 aa, Streptococcus agalactiae
MLSVGLVLEGGGMRGLYTAGVLDAFLDAGIKIDGIVSVSAGALFGVNFVSRQRERALRYNKKYLSHPKYMSLRSWFRTGNFVNKDFTYYEVPMKLDVFDDEAFKKSSIDFYVVATEMTSGKPEYFKIDSVFEQMEILRASSALPVVSKMVDWQGKKYLDGGLSDSIPVDFARGLGFDKLIVVMTRPLNYQKKPSSGRLYKTLYRKYPNFVKTASNRYQQYNNSLEKVMSLEKTGDLFAIRPSKSLVIGRLEKNPDKLDSIYQLGMKDAKSVMPELNSYLMK

SEQ ID NO: 59 - DNA, 486 bp, Streptococcus agalactiae
atgcaaccaattatttctattatcatgggttccaaatccgactggacaaccatgcaaaaaacggctgaagttctagataactttggcattgcttacgagaagaaagtcgtctctgcccaccgtacgccagacctcatgttcaagcatgctgaggaggcgcgtggtcgtggtatcaagattatcatcgctggagcaggtggagcagcccacttgccgggtatggtagcagctaaaacaaccctgcctgttatcggtgtgcctgtcaaatcacgtgccctctcaggtttggattcgctctactctattgtgcagatgcctggtggtgtgcctgtggcgaccatggctatcggagaagcaggagcgactaacgctgccctgacagccctccgtatcctctctatcgaggatcaaaatctggctgatgcgctagctcatttccatgaggaacaaggaaaaatcgcagaggagtcaagcaatgaactcatt

SEQ ID NO: 60 - protein, 162 aa, Streptococcus agalactiae
MQPIISIIMGSKSDWTTMQKTAEVLDNFGIAYEKKVVSAHRTPDLMFKHAEEARGRGIKIIIAGAGGAAHLPGMVAAKTTLPVIGVPVKSRALSGLDSLYSIVQMPGGVPVATMAIGEAGATNAALTALRILSIEDQNLADALAHFHEEQGKIAEESSNELI

SEQ ID NO: 61 - DNA, 432 bp, Streptococcus agalactiae
atgaagctgagaagaaattattttgttcaactttgggaatatgatgattggattcaagaaggacgtattgtactttttaggttgcttgaagagcatccgtatttattggataatgaaagcaaactattcatttactttaaaacaaaattttcaaattatttaaacgatgtattaagacaccaagattgtcaaaagcgacaatttaataaaatgccttatgaagaaataagtgaagttagtcactatgttaagagtaaaggactagttttagatgactatattgcttatcgtgatactttaacaaaagtggaagaaactttgtcagatattgataaagaaaaatttgaaaaactgattagtggtgaacgttttgcggggaagaaacaattcatacgagatattcaaccctttttcaatgcttttaaagcggat

SEQ ID NO: 62 - protein, 144 aa, Streptococcus agalactiae
MKLRRNYFVQLWEYDDWIQEGRIVLFRLLEEHPYLLDNESKLFIYFKTKFSNYLNDVLRHQDCQKRQFNKMPYEEISEVSHYVKSKGLVLDDYIAYRDTLTKVEETLSDIDKEKFEKLISGERFAGKKQFIRDIQPFFNAFKAD

SEQ ID NO: 63 - DNA, 1032 bp, Streptococcus agalactiae
gtgattacacaacgtcaaaatgatattttgaatttaatcgttgagttatttacacaaactcatgaaccagtagggtctaaagctttacagagaacgattgattctagtagcgccactattcgtaatgatatggcaaaactagagaagttggggttattggaaaaagcacacacttctagtggacggatgccgagtccagctggttttaagtattttgtagagcactcccttagactagatagtattgatgagcaagatatttatcatgttataaaagcttttgactttgaagcattcaaattagaagacatgcttcaaaaagctagtcatattttatcggagatgacgggctatacatccgttattttagatgtggagccagctcgtcaacgtttgacagggtttgatgttgttcagcttagcaaccatgatgctctagcagtcatgactttagatgaatctaagccagtgacagtgcagtttgctattccaagaaactttttgacacgtgacttgatagcatttaaagctatcgtagaggagcgcttgctggatggtagtgtcatggatattcattataagttgaggacagaaattcctcagatcgttcagaagtattttgtaactacggataatgttttacaactatttgattatgttttttcagagctgtttctggaaacggtatttgtagctggcaaggtaaattctttaacgtattcagatctatcaacgtatcagtttttggataatgagcagcaagtagcgatttctttgaggcaaagtctgaaagagggtgagatggcttctgtccaagtggcagatagtcaagaagccgcacttgcagatgtgtcagttttaactcacaaatttttgattccttaccgtggatttggactcctgagtttgattggtcctattgatatggattatcgtaggtctgttagtttggtaaacattatcggaaaggtattggctgctaaattaggtgattattatcgatacctaaattctaaccattatgaagttcac

SEQ ID NO: 64 - protein, 344 aa, Streptococcus agalactiae
MITQRQNDILNLIVELFTQTHEPVGSKALQRTIDSSSATIRNDMAKLEKLGLLEKAHTSSGRMPSPAGFKYFVEHSLRLDSIDEQDIYHVIKAFDFEAFKLEDMLQKASHILSEMTGYTSVILDVEPARQRLTGFDVVQLSNHDALAVMTLDESKPVTVQFAIPRNFLTRDLIAFKAIVEERLLDGSVMDIHYKLRTEIPQIVQKYFVTTDNVLQLFDYVFSELFLETVFVAGKVNSLTYSDLSTYQFLDNEQQVAISLRQSLKEGEMASVQVADSQEAALADVSVLTHKFLIPYRGFGLLSLIGPIDMDYRRSVSLVNIIGKVLAAKLGDYYRYLNSNHYEVH

SEQ ID NO: 65 - DNA, 1629 bp, Streptococcus agalactiae
atggtacaagctgccagtacacgtctgagtaaacaggcagagtatgtcaactcattaaatgtattcccagttccagatggtgatactggtacgaatatggggatgactatggaaaacggagccaaggaagtttcggacaaaccagcgacgactgttggagaagttggtcaaattctttctaaaggtgtattgatgggagcacgtggaaattcaggtgtaattacatcacaattattccgtggttttggtcaaagtatcaaggataaagaagaattaacgggtcaagatttggcacacgctttccagaatggtgttgaagtagcttataaagccgttatgaaaccagttgaaggaactatcttgacagtatcacgcggtgcagctaccgctgctctaaaaaaagctgaagaaactgatgatgcagttgaagttatgcgcgcaactctcaaaggtgctaagcgtgctcttgctaaaacaccggatatgctacctgttcttaaagaggttggtgttgttgattctggtggtcaaggactcgtctttatttacgaaggtttcctctcagcactgactggggaatatatcgcatcagaagattttaaagcaactcccgcaacaatgactgaaatggttaatgcagagcaccataaagctgtagtaggccacgtagccacagaagatattaaatatggctattgtacagaagtcatggttggtttaaagcaaggaccaacttacgttaaggaatttaactacgaagaatttcaaggttatcttagcaatctaggggattctttactagttgttaatgatgatgaaattgtcaaggttcatgttcatacagaagatccaggtcttgttatgcaagaaggtttgaaatatggatcgcttgtgaaggttaaagttgaaaacatgcgtaaccaacatgatgcccaaatgcaaaaggttgaagttgaagaaactgtcaaagaaactaaagaatatggtattattgctgttgtagctggtgacggtctagctgagatttttaaatcacaaggtgttgattatatcatctctggcggccagactatgaacccatctacagaagatattgtaaaagcgattgaaaaagtaaacgctagaaatgttattattttaccaaacaataagaacatcttcatggctgcacagtcagctgcagatgtcgttgatattccagcagcagtagtagagacacgtacagttccacaaggatttactagcttacttgcttttgatcctgctaagtctcttgaaactaatgtagctgatatgacaaatagcctctcagatgtcattagtggtagtgtgactttagctgttcgtgatacaacgatagatggccttgaaattcatgaaaacgacatccttgggatggttgatggtaaaattctagtatctacaccagatatggaaaaagcacttaaagacacttttgataaaatgattgatgaagatagtgaaatcgtgacaatctatgttggtgaagatggtaagcaagcattagctgagaccttgtcggaatatcttgaggaaacttatgaagatgttgaagttgagatccaccaaggagatcaacctgtatatccatacctcatgagcgttgaa

SEQ ID NO: 66 - protein, 543 aa, Streptococcus agalactiae
MVQAASTRLSKQAEYVNSLNVFPVPDGDTGTNMGMTMENGAKEVSDKPATTVGEVGQILSKGVLMGARGNSGVITSQLFRGFGQSIKDKEELTGQDLAHAFQNGVEVAYKAVMKPVEGTILTVSRGAATAALKKAEETDDAVEVMRATLKGAKRALAKTPDMLPVLKEVGVVDSGGQGLVFIYEGFLSALTGEYIASEDFKATPATMTEMVNAEHHKAVVGHVATEDIKYGYCTEVMVGLKQGPTYVKEFNYEEFQGYLSNLGDSLLVVNDDEIVKVHVHTEDPGLVMQEGLKYGSLVKVKVENMRNQHDAQMQKVEVEETVKETKEYGIIAVVAGDGLAEIFKSQGVDYIISGGQTMNPSTEDIVKAIEKVNARNVIILPNNKNIFMAAQSAADVVDIPAAVVETRTVPQGFTSLLAFDPAKSLETNVADMTNSLSDVISGSVTLAVRDTTIDGLEIHENDILGMVDGKILVSTPDMEKALKDTFDKMIDEDSEIVTIYVGEDGKQALAETLSEYLEETYEDVEVEIHQGDQPVYPYLMSVE

SEQ ID NO: 67 - DNA, 3648 bp, Streptococcus agalactiae
gtggttgacgtaaatcgttttaaaagtatgcaaatcacattagcatcaccaagtaaggtccgttcatggtcttatggtgaagttaaaaaacctgaaacaatcaactaccgcacattgaaaccagaacgtgaaggactttttgatgaagttatttttggtccaacaaaagattgggaatgtgcgtgtggaaaatacaaacgtattcgttacaaaggaatcatttgtgaccgttgtggcgttgaagtaacccgtgcaaaagttcgtcgcgaacgtatgggacatatcgagttaaaagcaccagtatctcatatctggtatttcaaaggtatcccatcgcgtatggggctcacattggatatgagtcctcgtgcacttgaagaagttatttattttgcggcttatgttgttatcgatccaatggacacaccattagaaccgaagtcactccttactgagcgtgaataccgtgaaaaacttcaagagtacggttacggttcgtttgttgctaaaatgggtgctgaagccattcaagatcttcttaaacgcgttgatttagatgcagaaatcgcagttcttaaagaggagttgaaatcagcgacaggtcaaaaacgtgtgaaagcagttcgtcgtctggatgtgttagatgcctttaaaaaatctggaaataaaccagaatggatggttcttaacattttaccggttatcccaccggatcttcgtccgatggttcaattagatggtggtcgttttgcggcatcagacttgaatgacctttaccgccgtgttattaaccgtaacaatcgtttggcacgtttgttggaattaaatgctcctggcatcatcgttcaaaatgaaaaacgtatgttacaagaagctgttgatgcgcttatcgacaatggtcgtcgtggtcgtccaattaccggaccaggtagtcgtcctttgaaatcattaagccatatgcttaaaggtaaacaaggtcgtttccgccaaaacttgcttggtaaacgtgttgacttctctggacgttccgttattgctgttggtccaacactcaaaatgtaccaatgtggtgtaccacgtgaaatggctattgagctcttcaaaccttttgtaatgcgtgaaatcgttgctcgtgacctcgcagggaacgttaaagcagctaaacgtatggttgaacgtggggacgagcgtatttgggacatcttagaagaagttattaaagagcacccagtacttctaaaccgtgcacctactcttcacagattaggtatccaagcgtttgaacctgtccttattgatggtaaggcgcttcgtcttcacccacttgtatgtgaggcctacaatgctgactttgatggagaccaaatggccatccacgttccattgtctgaagaagcccaagcagaagctcgtcttttgatgcttgctgcagagcacatccttaaccctaaagatggtaagccagtcgtaacaccatctcaggacatggttttaggaaattactacctgactatggaagatgctggtcgtgaaggtgaaggcatgattttcaaagatcatgacgaagcagttatggcatatcaaaatggttatgttcatttacatacacgtgttggtatcgctgttgattcaatgccgaataagccttggacagaagagcaaaaacataaaatcatggttacaacagttggtaagattctcttcaacgatatcatgcctgaagatttaccgtacttaattgaacctaataatgcaaacttgacagaaaaaactccagataaatacttcttagagccaggtcaggatattcaagcagttattgataacttagagattaatattccctttaagaagaaaaatcttggtaatattatcgcagaaacttttaaacgtttccgtacaacagaaacttctgctttccttgaccgtttgaaggaccttggatattatcattcaacacttgctggtttgactgtgggtattgctgatatcccagttattgacaataaagctgagattattgatgcagctcaccacagagttgaagatatcaataaagccttccgtcgaggtttgatgactgaagaagatcgttatgttgctgttacaacaacatggcgtgaagctaaagaagcacttgaaaaacgtcttattgagacacaagatccaaagaaccctatcgttatgatgatggactcaggagctcgtggtaacatctcaaacttctcacaacttgccggtatgcgtggtttgatggctgctcctaacggacgtatcatggaattgccaatcttatcaaacttccgtgaaggtcttagtgttttggaaatgttcttctcaactcacggtgcgcgtaaaggtatgactgatacggcccttaagacagccgactcaggttaccttactcgtcgtttggttgacgttgcccaagatgttattattcgtgaagatgactgtggaacagaccgcggtttgacaatcacagcaattacagatggtaaagaggttactgagacacttgaagagcgtttgataggacgttatactaagaagtcaatcaaacatcctgagacaggtgaaattctcgttggtgcagataccttaattactgaagatatggctgctaaagttgttaaagcgggcgttgaggaagtaactatccgatcagtatttacatgtaacactcgccatggtgtttgtcgtcactgttacggtattaacttggcaacaggtgatgctgttgaggttggtgaagcagttggtactattgcagctcaatctatcggtgaaccagggacacagcttacaatgcgtaccttccataccggtggtgttgcttcaaatactgatattacacaaggtctcccacgtatccaagaaatctttgaagcacgtaaccctaaaggtgaggcagttattactgaagttaagggtgaagtcgttgcaattgaagaagactcttcaacacgtactaagaaagtattcgttaaaggtcagacaggtgagggagaatacgttgttccatttacagcacgtatgaaagttgaagttggtgatgaagtagctcgtggtgcggccttaactgaaggatctatccaaccaaaacgtctccttgaagttcgtgatactttatctgttgaaacgtacctacttgctgaagtacaaaaagtttaccgtagccaaggggtagaaatcggagataaacacgttgaggtaatggttcgtcaaatgctccgtaaagttcgtgtcatggatccaggagatacagatcttcttccaggtacacttatggatatttcagactttacagatgctaacaaagatattgttatttctggtggaatccctgcgacaagccgtcctgtccttatgggtattactaaggcttcccttgaaactaattcattcttatcagctgcatccttccaagaaacaacacgtgtccttacagatgctgctatccgtggtaagaaagatcacttacttggtcttaaagaaaatgttattatcggtaaaatcattccagcgggtactggtatggctcgttaccgtaatattgaaccacttgctgttaatgaagttgagattattgaaggaactcctgttgatgcagaagttacggaagtatcaacacctacaacagaagat

SEQ ID NO: 68 - protein, 1216 aa, Streptococcus agalactiae
MVDVNRFKSMQITLASPSKVRSWSYGEVKKPETINYRTLKPEREGLFDEVIFGPTKDWECACGKYKRIRYKGIICDRCGVEVTRAKVRRERMGHIELKAPVSHIWYFKGIPSRMGLTLDMSPRALEEVIYFAAYVVIDPMDTPLEPKSLLTEREYREKLQEYGYGSFVAKMGAEAIQDLLKRVDLDAEIAVLKEELKSATGQKRVKAVRRLDVLDAFKKSGNKPEWMVLNILPVIPPDLRPMVQLDGGRFAASDLNDLYRRVINRNNRLARLLELNAPGIIVQNEKRMLQEAVDALIDNGRRGRPITGPGSRPLKSLSHMLKGKQGRFRQNLLGKRVDFSGRSVIAVGPTLKMYQCGVPREMAIELFKPFVMREIVARDLAGNVKAAKRMVERGDERIWDILEEVIKEHPVLLNRAPTLHRLGIQAFEPVLIDGKALRLHPLVCEAYNADFDGDQMAIHVPLSEEAQAEARLLMLAAEHILNPKDGKPVVTPSQDMVLGNYYLTMEDAGREGEGMIFKDHDEAVMAYQNGYVHLHTRVGIAVDSMPNKPWTEEQKHKIMVTTVGKILFNDIMPEDLPYLIEPNNANLTEKTPDKYFLEPGQDIQAVIDNLEINIPFKKKNLGNIIAETFKRFRTTETSAFLDRLKDLGYYHSTLAGLTVGIADIPVIDNKAEIIDAAHHRVEDINKAFRRGLMTEEDRYVAVTTTWREAKEALEKRLIETQDPKNPIVMMMDSGARGNISNFSQLAGMRGLMAAPNGRIMELPILSNFREGLSVLEMFFSTHGARKGMTDTALKTADSGYLTRRLVDVAQDVIIREDDCGTDRGLTITAITDGKEVTETLEERLIGRYTKKSIKHPETGEILVGADTLITEDMAAKVVKAGVEEVTIRSVFTCNTRHGVCRHCYGINLATGDAVEVGEAVGTIAAQSIGEPGTQLTMRTFHTGGVASNTDITQGLPRIQEIFEARNPKGEAVITEVKGEVVAIEEDSSTRTKKVFVKGQTGEGEYVVPFTARMKVEVGDEVARGAALTEGSIQPKRLLEVRDTLSVETYLLAEVQKVYRSQGVEIGDKHVEVMVRQMLRKVRVMDPGDTDLLPGTLMDISDFTDANKDIVISGGIPATSRPVLMGITKASLETNSFLSAASFQETTRVLTDAAIRGKKDHLLGLKENVIIGKIIPAGTGMARYRNIEPLAVNEVEIIEGTPVDAEVTEVSTPTTED

SEQ ID NO: 69 - DNA, 912 bp, Streptococcus agalactiae
atgtctaagaaattaacttttcaagaaattattctaactttacaacagttttggaatgaccaaggctgtatgttaatgcaagcttatgataatgagaaaggagcagggacaatgagcccttatactttcttacgtgctataggccctgagccttggaatgctgcatacgttgaaccatcacgtcgtccagctgacggccgctatggcgaaaatccaaaccgtctttaccaacatcatcaatttcaagtggtaatgaagccttcgccgtcaaatattcaagaactttatttgaagtctttggaattactaggtatcaatccacttgagcatgatatccgttttgttgaagataactgggaaaatccatctacaggttcagctggattaggttgggaagtttggcttgatggaatggaaataacacaatttacttatttccaacaagtaggtggacttcaaacaggtcctgtaacttctgaagttacttatggactagagcgtttagcctcttatattcaagaggtagattctgtttatgatattgagtgggcaccaggtgttaaatatggtgaaatctttactcagccagagtatgagcattcaaaatattcatttgagatatcagaccaagtaatgttacttgaaaactttgagaaatttgaaagagaagcaaaacgtgctttagaagaaggacttgttcatccagcttatgactacgtccttaaatgttcacacacctttaatttattagatgcacgtggagcagtatctgttactgagcgtgcaggctatattgcacgtatccggaatttagcacgtgttgttgctaaaacctttgttgccgaacgtaaaaaacttggtttcccacttttggatgaggaaactcgtatcaaattacttgctgaggaagac

SEQ ID NO: 70 - protein, 304 aa, Streptococcus agalactiae
MSKKLTFQEIILTLQQFWNDQGCMLMQAYDNEKGAGTMSPYTFLRAIGPEPWNAAYVEPSRRPADGRYGENPNRLYQHHQFQVVMKPSPSNIQELYLKSLELLGINPLEHDIRFVEDNWENPSTGSAGLGWEVWLDGMEITQFTYFQQVGGLQTGPVTSEVTYGLERLASYIQEVDSVYDIEWAPGVKYGEIFTQPEYEHSKYSFEISDQVMLLENFEKFEREAKRALEEGLVHPAYDYVLKCSHTFNLLDARGAVSVTERAGYIARIRNLARVVAKTFVAERKKLGFPLLDEETRIKLLAEED

SEQ ID NO: 71 - DNA, 222 bp, Streptococcus agalactiae
atgtttttagaaatagcaaaagtttatttacaaggtttagggcttgccagcataactgttattttagttggtataatttgggtcttttggcgtgccaagaaaaacatagataaaacagctagagaacgccaatctgttctttatgatgtccttctgatagctcttatgacagctccaatacttgcctttgcatttgtagctatcattttaatgataaaagct

SEQ ID NO: 72 - protein, 74 aa, Streptococcus agalactiae
MFLEIAKVYLQGLGLASITVILVGIIWVFWRAKKNIDKTARERQSVLYDVLLIALMTAPILAFAFVAIILMIKA

SEQ ID NO: 73 - DNA, 639 bp, Streptococcus agalactiae
atggataaaataaaaattgtacttgttgatgaccatgagatggttcgtctcggtttaaaaagttttttaaacttacaagctgatgttgaagtaataggtgaggcctcaaatggtttagaaggcataaaaaaagcactggagttacgtccagacgttgttgttatggacttagtaatgcctgaaatggacggtgtagaagcaaccttagcattattgaaggattggccagaagctgccattttagtcttaacatcttacttggataatgaaaaaatttaccctgttattgaagcaggtgccaaaggctatatgttaaagacctcaagcgcagcagagattcttaatgccattcgtaaagtttcaaggggagaacaagctattgaaaatgaagtagataagaaaattaaggctcatgataaatgtccagctttacatgagggcttaacagcaagggaacgtgatatccttaatttattagccaaaggttatgacaatcaaaggattgctgatgaattatttatctcgttaaagactgttaaaactcatgtttctaatattttgggaaaactaaatgtagcagatcgaactcaagcagttgtctatgctttccaacaccatttggtaccacaagatgatgaa

SEQ ID NO: 74 - protein, 213 aa, Streptococcus agalactiae
MDKIKIVLVDDHEMVRLGLKSFLNLQADVEVIGEASNGLEGIKKALELRPDVVVMDLVMPEMDGVEATLALLKDWPEAAILVLTSYLDNEKIYPVIEAGAKGYMLKTSSAAEILNAIRKVSRGEQAIENEVDKKIKAHDKCPALHEGLTARERDILNLLAKGYDNQRIADELFISLKTVKTHVSNILGKLNVADRTQAVVYAFQHHLVPQDDE

SEQ ID NO: 75 - DNA, 981 bp, Streptococcus agalactiae
atgaaattagagcgtcaaaaattgttagctaaagtagcttacctttactatatggaagggaaaagccaatctgagattgccaatgaattaggaatttatcgtacaacaataagtcgtatgttagccaaagcgagagaagaaggtcttgttagaatcgaaatttcagattttaatccagaaatttttcagttagaatcctattttaaaagtaaatatcaccttaaagatattgagattgtttcttcgcgaaaagatagcgatacttcagagatagagaaggatttagcacatgtagctgcagctatgattcgaaaaaaaattaaagagaatgacaaggtggggattgcttgggggaggacacttagtaaagtagttgaagcaatgcgtcctcatccggtttctcaagtttcttttgttcctttggccggaggtccaagtcatattaatgcacgctatcacgttaatactctggtttacgaaatgtcaaggcgtttccaaggaagttgtactttcattaatgcaactctagttcaagaaaacgctaatttagcgaaaggaatattaacttcaaaatattttgaggggctaatggataattgggaaaaacttgatgtggcaattgtgggcgttggtggtaaacctaaaagcaatgaacaacagtggcttgaccttttaaatcaagatgattttcaatgcttggatgaagaagcagctgtaggtgaaattacttgtcgtttttttaatcattcaggtgatcctgtgaatcaacatttagctaaaaggacaataggaattaccttagaacaactacagaaagttcctaatagaatagcggttgctcatggcaattataaggctgcggcactcttagccgttttaaaaaaggggtatattaatcatttagttactgatttttccacagccttaaatattttaagattagataaagacacctttgtggatactatatatcaaaagagc

SEQ ID NO: 76 - protein, 327 aa, Streptococcus agalactiae
MKLERQKLLAKVAYLYYMEGKSQSEIANELGIYRTTISRMLAKAREEGLVRIEISDFNPEIFQLESYFKSKYHLKDIEIVSSRKDSDTSEIEKDLAHVAAAMIRKKIKENDKVGIAWGRTLSKVVEAMRPHPVSQVSFVPLAGGPSHINARYHVNTLVYEMSRRFQGSCTFINATLVQENANLAKGILTSKYFEGLMDNWEKLDVAIVGVGGKPKSNEQQWLDLLNQDDFQCLDEEAAVGEITCRFFNHSGDPVNQHLAKRTIGITLEQLQKVPNRIAVAHGNYKAAALLAVLKKGYINHLVTDFSTALNILRLDKDTFVDTIYQKS

SEQ ID NO: 77 - DNA, 771 bp, Streptococcus agalactiae
atgaataatgatgtgacaagaattttaaaagatgcgcgtgatcaagggaggctaactgctcttgactacgctgaattgatttttgataattttatggaacttcatggtgatcgccagttcgcagatgacaaatcaattataggaggtttggggtacttggcagggcgtcctgtgacgattgtcggtattcaaaaaggtaagaaccttcaagataatttagaccgtcattttggtcaaccacatcctgaaggttatcgtaaggctttacgtttaatgaaacaagctgagaagtttggaagacctgttataaccttcatcaatactgctggagcatatcctggggtaggtgctgaggagcgaggtcagggtgaagcaattgctagaaacctcttagaaatgagtgatttaaaagtccctattatagctattattattggtgaagggggttctggaggagcattagctttagctgttgccgataaggtttggatgttggaacatactgtttattctattttaagtcctgagggctttgcctctattttatggaaagatggtacaagaacaacagaagcagcacaattaatgaagatgactgctggagaactttaccatatggaagttgtagacaaagtaatccctgaacatggttatttttcaagtgagattgtcgatatgattaagacaagtttaatttcagagttagaagtgctctcacaattatctcttgaggatttattggaacaacgttaccaacgttttagaaaatat

SEQ ID NO: 78 - protein, 257 aa, Streptococcus agalactiae
MNNDVTRILKDARDQGRLTALDYAELIFDNFMELHGDRQFADDKSIIGGLGYLAGRPVTIVGIQKGKNLQDNLDRHFGQPHPEGYRKALRLMKQAEKFGRPVITFINTAGAYPGVGAEERGQGEAIARNLLEMSDLKVPIIAIIIGEGGSGGALALAVADKVWMLEHTVYSILSPEGFASILWKDGTRTTEAAQLMKMTAGELYHMEVVDKVIPEHGYFSSEIVDMIKTSLISELEVLSQLSLEDLLEQRYQRFRKY

SEQ ID NO: 79 - DNA, 507 bp, Streptococcus agalactiae
atgctatggggctgtcagaatcagcaaactgttggaagacagagatatttctggtataatatctctatgttttatactcaaaatgaagaagagcttattgccctagggcaaaaactgggtactgttttaaagtcaggagatatcgtattattgactggtaatttaggtgcaggcaaaacaactcttacaaaaggtattgcaaagggattagacataaaacaaatgattaagagcccaacttacactattgttagagaatatgaagggcgtgtaccactttaccatttggatgtttatcgtattggagatgatcctgattctattgacttagatgacttcttgtttggtcaaggagtaacagttattgaatggggagagttgcttagtgataaccttatcaataactacttagaaattgttattacgaggagcaatcaaggacgtcaggttcagttagaagcttatgggcatcgcgcaagagaaattattgaggcgattcaagatgtc

SEQ ID NO: 80 - protein, 169 aa, Streptococcus agalactiae
MLWGCQNQQTVGRQRYFWYNISMFYTQNEEELIALGQKLGTVLKSGDIVLLTGNLGAGKTTLTKGIAKGLDIKQMIKSPTYTIVREYEGRVPLYHLDVYRIGDDPDSIDLDDFLFGQGVTVIEWGELLSDNLINNYLEIVITRSNQGRQVQLEAYGHRAREIIEAIQDV

SEQ ID NO: 81 - DNA, 366 bp, Streptococcus agalactiae
atgaagaaaggattaattatggctaatcatcgtattgatcgcgttggaatggaaattaaacgtgaagtcaatgagattttgcgtctccgagttaatgatccacgtgtacaagatgtcacaattactgatgttcagatgttgggtgacctttcaatggctaaagtattttatactattcattcgacacttgcttctgataatcaaaaagcacaaattggtttagaaaaagcaactggtactattaagcgtgaacttggcaaaaaccttactatgtataaaataccagatttacaatttgttaaagatgaatctattgaatacggaaataagattgatgaaatgttgcgcaatctagataaaaaagat

SEQ ID NO: 82 - protein, 122 aa, Streptococcus agalactiae
MKKGLIMANHRIDRVGMEIKREVNEILRLRVNDPRVQDVTITDVQMLGDLSMAKVFYTIHSTLASDNQKAQIGLEKATGTIKRELGKNLTMYKIPDLQFVKDESIEYGNKIDEMLRNLDKKD

SEQ ID NO: 83 - DNA, 819 bp, Streptococcus agalactiae
atggtattatttacaggagcgactgtagaagaagctattgaaaaaggactacaagagttaaacatttcacgattgagggcacatataaaagttgtatcacgtgagaaaaaaggttttttgggctttggtaaaaagccagcaaaagttgaaatagaaggtatcaccgacgaagtaactgatattaatgaatcggtagcgttaaaaaatattaagaatgtaccgtctagcgtagatgtggtggaagaatatatagaggaggttgatgaaacgcttgaaaaagaagacgtatcacaaccagaacttccaaaaattgatgataaaaacgttgtaactacaagtgaagctattgaaaaaattgacctacttcctaatattgaagtagcagctgctcaggtgactaaatacgttgaaaatatcatctatgagatggatttagatgcaacaatagaaactacgacaagtaagcgacaaataaatctccaaatagaaacgccagaagctgggcgcatcattggttatcatggaaaagtattaaaatcgttgcagttgttagcacaaaattatcttcatgaccgcttttctaagagtttttcagtatccattaatgtccatgactacgttgagcatcgtacagaaactttaattgatttttctaaaaaaatagctaggcgtgttttagagactaatgaaccttaccatatggatcctatgagtaacagtgagcgaaaaactgttcataaaacaattgcaactatagagggtgttgaaagttattctgaaggtaacgatcctaatagatttgtagtagttactaagaaa

SEQ ID NO: 84 - protein, 273 aa, Streptococcus agalactiae
MVLFTGATVEEAIEKGLQELNISRLRAHIKVVSREKKGFLGFGKKPAKVEIEGITDEVTDINESVALKNIKNVPSSVDVVEEYIEEVDETLEKEDVSQPELPKIDDKNVVTTSEAIEKIDLLPNIEVAAAQVTKYVENIIYEMDLDATIETTTSKRQINLQIETPEAGRIIGYHGKVLKSLQLLAQNYLHDRFSKSFSVSINVHDYVEHRTETLIDFSKKIARRVLETNEPYHMDPMSNSERKTVHKTIATIEGVESYSEGNDPNRFVVVTKK

SEQ ID NO: 85 - DNA, 435 bp, Streptococcus agalactiae
acttgggatgatattgattttgaaagaaatagtatttatacatatcgaagatattcttcaataaaaaatgactttacaaagcctaaaacaaggacttcaataaggagagtttcagtaagtcatgatttaaaagagttattgcttgaactaaaatttcaacaagaaagaatgctgaaaggtttgcatataaaaaatacagatcaattgattttttatgactataggtttggtatgatatcaaatgatgctgttaacaaattcttggcaagctcattggaaaaattagaaatagaatctaagatgtcatcaacaggtgctagacatacttatggaagttatttgttggctaacggagtagatatttgggcggttgcaaaattaatggggcataaagatatcaaacaattaatagaaacatatggtcatttgcttctg

SEQ ID NO: 86 - protein, 145 aa, Streptococcus agalactiae
TWDDIDFERNSIYTYRRYSSIKNDFTKPKTRTSIRRVSVSHDLKELLLELKFQQERMLKGLHIKNTDQLIFYDYRFGMISNDAVNKFLASSLEKLEIESKMSSTGARHTYGSYLLANGVDIWAVAKLMGHKDIKQLIETYGHLLL

SEQ ID NO: 87 - DNA, 567 bp, Streptococcus agalactiae
atgcagattctagaagatttcgatggcaaagcattaccaaaactagaaacggatcggcttatcttgcgtcagcgaacggtgggggatgtcccagccatgtttgattacgtttgcttggaagaggttgcctatccagcaggactcagcccaatagcttctttagaagatgagtacgattattttgaaaatcgctactatcaaaatctggaaaaggcaaaattaccatctggttatggtattaccgttaaaggaagtgatcgtattatcggatcctgcgcctttaaccatcgccatgaagacgatgttttcgagatttgctatctgcttcatcctgactactggggtcatggctatatgacagaagctgtcgccgctttgattgaagtcggttttacccttctcaatctccacaaaatcgaaatccgctgctatgattacaataagcaaagccggcgcgtggcagaaaaactaggattcacccttgaagctaccattcgtgatcgtaaggataatcaagacaatcgctgtgtcaatttgatatatggtttgctgaggagtgagtgggag

SEQ ID NO: 88 - protein, 189 aa, Streptococcus agalactiae
MQILEDFDGKALPKLETDRLILRQRTVGDVPAMFDYVCLEEVAYPAGLSPIASLEDEYDYFENRYYQNLEKAKLPSGYGITVKGSDRIIGSCAFNHRHEDDVFEICYLLHPDYWGHGYMTEAVAALIEVGFTLLNLHKIEIRCYDYNKQSRRVAEKLGFTLEATIRDRKDNQDNRCVNLIYGLLRSEWE

SEQ ID NO: 89 - DNA, 564 bp, Streptococcus agalactiae
atgaatattattatcatcggagcacaagcttctgggaaaatgacaattggtcaggaaatcgcaaaacagacaggcatgaccttattccataaccatgattctatagattttgttttacgcttcatgccatggtctccagatagtattgctctaacggagtctattcgctttaaattttttgaaacgtttgctaagactggtcaagaaatgatttttactattgtaattgatttcaatgattcaagagatgtagtatttctagaaaagattcaaatagtttttcaatctcacaaccaagaggtattatttgtagaattagaaacagagctaagtgagcgtctcaaacgaaatcgcacagaaaatcgcctcaagcataagccttcaaaacgtgatatcaaatggtcagagagcgatatttgttcaaccatggattacgctatctttaatcctgaagtagccccagaagcgcttacatattatcataaaatcaataatacttgcttaactgctactgaaacagcatatcttattattcaaaaaataaaccaaatcaaggagaaaaac

SEQ ID NO: 90 - protein, 188 aa, Streptococcus agalactiae
MNIIIIGAQASGKMTIGQEIAKQTGMTLFHNHDSIDFVLRFMPWSPDSIALTESIRFKFFETFAKTGQEMIFTIVIDFNDSRDVVFLEKIQIVFQSHNQEVLFVELETELSERLKRNRTENRLKHKPSKRDIKWSESDICSTMDYAIFNPEVAPEALTYYHKINNTCLTATETAYLIIQKINQIKEKN

SEQ ID NO: 91 - DNA, 1062 bp, Streptococcus agalactiae
atgtcaatagaatcagattttttccggaaaaaacgttttattttttcatcgcttgaggagtttggatttatcaaatctgaccaagagtatatctattgtcaaacatttatggataatgactttaaagctattatcacgatttcattggatggaaagatagctggtaaggttattgattcggcacttgaagaagaatatttaccgcttcgagcagcaaattataatggttcgtttgttggcgaagtacgatcggcttatatggctatattaggtgatatttcagattcttgttgtaaggacttattatttaccaaagatcaaagtaatcgtttagcggagaagatagctaaaacttttgaagattcagttgattatccatttgcgaagcacccacaatatgcttcctatcgtgtgtcaggtaaatggtatgctctgctttttccattgaagatggggaaactagaaaatgttccagctcaactgtcagaagatgaggttgaagttttgaatattaaagtcaatcctcaagatatggaaatacttttacaaaaagaaggtatttatccttcttatcatatgtctaaaaagacttgggtatctatcgttttagacaatactttgtctgatatagaaatttttaaattggtatcagatagtcgtaagcttgtttctcacaataaaaaatcaaattctgagccagagttttggattattcctgctaatcctaaattttacgatattgataaggagtttgcagagcatcaattgattgattggactcaaaaaggaaagattgcggtgggagattatgtgtttatttatattacagcacctattcgtgcttttcgctatgtctgtcaagtgatagaacgtgaccttaaaacaagtacttacttaggagcaagagatgtcaaagcttatatgcgactcaaactgataaggcaatttgaagattctacctatcctgtagcatttttagcagaacacggcgttaagactgtgagaggaccacggcgaatgaccaaggaattgcgacaagtcatggcaaaaacaattctagag

SEQ ID NO: 92 - protein, 354 aa, Streptococcus agalactiae
MSIESDFFRKKRFIFSSLEEFGFIKSDQEYIYCQTFMDNDFKAIITISLDGKIAGKVIDSALEEEYLPLRAANYNGSFVGEVRSAYMAILGDISDSCCKDLLFTKDQSNRLAEKIAKTFEDSVDYPFAKHPQYASYRVSGKWYALLFPLKMGKLENVPAQLSEDEVEVLNIKVNPQDMEILLQKEGIYPSYHMSKKTWVSIVLDNTLSDIEIFKLVSDSRKLVSHNKKSNSEPEFWIIPANPKFYDIDKEFAEHQLIDWTQKGKIAVGDYVFIYITAPIRAFRYVCQVIERDLKTSTYLGARDVKAYMRLKLIRQFEDSTYPVAFLAEHGVKTVRGPRRMTKELRQVMAKTILE

SEQ ID NO: 93 - DNA, 564 bp, Streptococcus agalactiae
atgttactattggtagataattacgattcttttacctataatttaaagcaatatttaagtgtctataaagaggtattcgtcataaaaaatgatgttcctaacctttttttattagctgagagcgcagaagccatcgtcttatcacctggaccaggacacccaaaggatgctgggaaaatggtagaattaatcaatcagtttataggaaagaaacctattctaggtatctgtttggggcatcaagcgcttgccgagtgcttgggtgggcgattaaatttagcaaatcacgttatgcatggtaaacaaagttgggtaacaataaacgaccatactagtttgtttaagggaattgatagtccaacccaagttatgcgttatcattcattggtagtgactgatttaccagagaatattgctgttattgcacgatcaaatgaggataatgaaatcatggcattccattgccccagcttaaaggtatatgcgatgcagtttcatcctgagtcaatcgggagtattgatggaatgaaaatgattgaaaactttttgacgttaattaatgac

SEQ ID NO: 94 - protein, 188 aa, Streptococcus agalactiae
MLLLVDNYDSFTYNLKQYLSVYKEVFVIKNDVPNLFLLAESAEAIVLSPGPGHPKDAGKMVELINQFIGKKPILGICLGHQALAECLGGRLNLANHVMHGKQSWVTINDHTSLFKGIDSPTQVMRYHSLVVTDLPENIAVIARSNEDNEIMAFHCPSLKVYAMQFHPESIGSIDGMKMIENFLTLIND

SEQ ID NO: 95 - DNA, 870 bp, Streptococcus agalactiae
atggttactattgaaaaaattgatgaagctattcatcgttattacaaacagacacatagtgtcgtttctcctgatttgattaaggctatcctctactcagttgatggaggtgggaaacgtattcgtccacgcatccttttagaaattttagagggatttggagttgaactaatagatggtcattatgatgtggctgctgctttggagatgattcacaccggctcattaatccatgatgatttaccggcgatggataatgatgattttcgtcgtggccgcttaacaaaccataaaaagtttgatgaagctacagcggttttagctggagattccctttttttagacccatttgatttagttgtaaaagctggttttaaagctgatgttactgttaggttaatagagttattgtctatgtctgcgggtagttttggcatggttggtggacaaatgttagatatgaagggagaaaacaaagttttatctattgacgatttaagcttgattcatattaataaaacgggacgcctgttagcttatccctttgttgcagcaggtattttagctgagaagtcggaagaagtaaaaggaaaactgcatcaagctggccttttaatcggtcatgcttttcaagtacgtgatgatattttagatgtgactgctagttttgaagaattggggaagacaccaaataaagacattgtagcagaaaagacaacttatccaaatttattgggtttggataagtcacaggaaatacttgatgatactttgaaaaaagctcaggcaatttttcaaaatctagagaaaaaagctaactttaatgctagaaaaataatagatataatagagggattacggttgaatggc

SEQ ID NO: 96 - protein, 290 aa, Streptococcus agalactiae
MVTIEKIDEAIHRYYKQTHSVVSPDLIKAILYSVDGGGKRIRPRILLEILEGFGVELIDGHYDVAAALEMIHTGSLIHDDLPAMDNDDFRRGRLTNHKKFDEATAVLAGDSLFLDPFDLVVKAGFKADVTVRLIELLSMSAGSFGMVGGQMLDMKGENKVLSIDDLSLIHINKTGRLLAYPFVAAGILAEKSEEVKGKLHQAGLLIGHAFQVRDDILDVTASFEELGKTPNKDIVAEKTTYPNLLGLDKSQEILDDTLKKAQAIFQNLEKKANFNARKIIDIIEGLRLNG

SEQ ID NO: 97 - DNA, 384 bp, Streptococcus agalactiae
atgaaactagaaattaacaataacattcaaattgacaacgaaaccgaaatgattcatgagattcacgattgtcaatttattgaaaaaggaagttacgtttatttgaattatattaatgctgagggcgagagggtagttattaaggcaaatcatgaggaattgcttatgacgaggttttcaaatcctaagtctgtaatgcgttttcatcgtgaaacgcctgctttggttaatatccccactccacttggtgttcaacatttgattacagagacaagtcactatcagtttgatttgtcacagcaaaggttgcatatcaattatgtccttaagcaaacggagacaggagactgttttgcaaattatgaattaaggattcaatggtat

SEQ ID NO: 98 - protein, 128 aa, Streptococcus agalactiae
MKLEINNNIQIDNETEMIHEIHDCQFIEKGSYVYLNYINAEGERVVIKANHEELLMTRFSNPKSVMRFHRETPALVNIPTPLGVQHLITETSHYQFDLSQQRLHINYVLKQTETGDCFANYELRIQWY

SEQ ID NO: 99 - DNA, 201 bp, Streptococcus agalactiae
atgacgaagccgaggaaacaaaggatatatgcaatatatgatgacgacaaatttgtcgacgttggcacaaaagaagagttatcggcacggcttggaattaaaaaagcaacaatagaacagtacatgactaaatcatatcaagcgttagctagctcaaaacgaattgcattgttggtagggattgaagaggaatatgacttt

SEQ ID NO: 100 - protein, 67 aa, Streptococcus agalactiae
MTKPRKQRIYAIYDDDKFVDVGTKEELSARLGIKKATIEQYMTKSYQALASSKRIALLVGIEEEYDF

SEQ ID NO: 101 - DNA, 336 bp, Streptococcus agalactiae
atggggaaattgaaaggaataacagttactttagtcgacaagacgattagcggaaaagaccctttcgggaacccgataaaagttgattttgatattaaaattgagaatgttcttgttgcaccggcaactaccgaagacatcaccaatcagttatctttgaccggaaaaaaagttgaatatatcttggcaattccaaaaggagataagcatgattgggaggataaagaggtttgcttttttgacaaaaagtggcgcactgtcggcctagctcttgaaggtattgaagagcttattccgcttgaatggaataagaaagttatggtggaaagatatgag

SEQ ID NO: 102 - protein, 112 aa, Streptococcus agalactiae
MGKLKGITVTLVDKTISGKDPFGNPIKVDFDIKIENVLVAPATTEDITNQLSLTGKKVEYILAIPKGDKHDWEDKEVCFFDKKWRTVGLALEGIEELIPLEWNKKVMVERYE

SEQ ID NO: 103 - DNA, 168 bp, Streptococcus agalactiae
atggataaagaattaacacctcaagaaaaagcaaataaaaagtgggcagaaaacaatagagaacatagaacctatctatcaaaacgatctactgctcgtagttttattaacaaaaatgctacaaaagaagacttattagaattaaaacaattaattgaaagcaaactc

SEQ ID NO: 104 - protein, 56 aa, Streptococcus agalactiae
MDKELTPQEKANKKWAENNREHRTYLSKRSTARSFINKNATKEDLLELKQLIESKL

SEQ ID NO: 105 - DNA, 210 bp, Streptococcus agalactiae
atgcagctgttagatgagttagttcttccaaaagacattaccatagcagatgtcagtcaaagtatccaagaatttgaaatagaaagagatgcccttcaagaattttttgacgatatgctgaagacttatacaacctaccaagaaatgaaagattatattaaatctcgtgaagcgaacactcctaagcaagagacagaagaaaaatcactt

SEQ ID NO: 106 - protein, 70 aa, Streptococcus agalactiae
MQLLDELVLPKDITIADVSQSIQEFEIERDALQEFFDDMLKTYTTYQEMKDYIKSREANTPKQETEEKSL

SEQ ID NO: 107 - DNA, 273 bp, Streptococcus agalactiae
atgtcaacatttaaacgctatgatgaagaattcaaacaatctcttgttaacctttatcaaactggaaaaactcagtctgaactctgtaaagactatagggtatccacttctgcgcttgcaaaatggatcaaacagtactctcaattcaaactcgaagataattctgtacttactgccaagcaaatacaagagttacaaaaacgtaatgcgcagcttgaagaggagaaccttatcctaaaaaaagcaagtgccatattcatgcaaaacttaaag

SEQ ID NO: 108 - protein, 91 aa, Streptococcus agalactiae
MSTFKRYDEEFKQSLVNLYQTGKTQSELCKDYRVSTSALAKWIKQYSQFKLEDNSVLTAKQIQELQKRNAQLEEENLILKKASAIFMQNLK

SEQ ID NO: 109 - DNA, 990 bp, Streptococcus agalactiae
atgaaactcaaagtatttaatgttagagaagaagaagcaacattagcacaagattgggcaaaccgaaatcatgtggaactttctatgagtgaaggacctttgacattggaaactgttaatgaggtagaaggttttgatgggattgctaatgcacagattgagcctttagatgatgctatttatcctcttctcaaagaaatgggaattaagcaaatcgctcagcgcagtgctggtgttgatatgtataatcttgagttagctaagcaacatggtattatcattagcaatgtgccaagttactcaccggagtctattgcagaatttacagtgacaatcgctcttaaccttattcgaaaagttgagcttattagagctaatgttcgtgaacagaatttttcatggaccttgccaattcgaggacgagtcctaggtaacatgactgtggctataataggaactggtcgcattggtctagcgactgctaaaatttttaaagggttcggatgtcgtgttattggttatgatatttaccataatccaatggcagatggtatccttgagtatgtcaattcggtagaagaagctgttgaagaagctgatcttgtgtccttacatatgccaccaactgctgaaaatacgcatctatttaatttagatatgtttaaacagtttaaaaaaggtgctattttaatgaatatggcacgtggagcattggtggaaaccaaagatcttcttgaggctttagatcaagggcttttggagggagctggtattgatacttatgaatttgaggggccatatatacctaaaaattgtcaaggtcaagacatttcagacaaggatttcctaagactgattaaccatccgaaagtaatatacactcctcatgcggcttattatacagatgaagcggtcaaaaatctagtagagggtgccttaaatgcttgtgtagaagtgattgaaacgggaacaactactacgaaagtcaac

SEQ ID NO: 110 - protein, 330 aa, Streptococcus agalactiae
MKLKVFNVREEEATLAQDWANRNHVELSMSEGPLTLETVNEVEGFDGIANAQIEPLDDAIYPLLKEMGIKQIAQRSAGVDMYNLELAKQHGIIISNVPSYSPESIAEFTVTIALNLIRKVELIRANVREQNFSWTLPIRGRVLGNMTVAIIGTGRIGLATAKIFKGFGCRVIGYDIYHNPMADGILEYVNSVEEAVEEADLVSLHMPPTAENTHLFNLDMFKQFKKGAILMNMARGALVETKDLLEALDQGLLEGAGIDTYEFEGPYIPKNCQGQDISDKDFLRLINHPKVIYTPHAAYYTDEAVKNLVEGALNACVEVIETGTTTTKVN

SEQ ID NO: 111 - DNA, 708 bp, Streptococcus agalactiae
atgattgaaatcaaggagaaaaaaatgaaagaattaagatcaaagctggaaaaagactatggtattgtttttgctaatcaagaattattagatacagcttttacccatacatcatacgcaaatgagcatcgcctcctaaacatttcacataatgaacgtttggaatttttaggagacgctgttctacaattacttatttcacagtatctttttacaaagtaccctcaaaaggcagaaggtgatttatcaaaattacgttcaatgattgttcgtgaggaaagtcttgcaggtttttcacgtctatgtggctttgatcactatattaaacttggaaaaggagaagaaaaatctggtggacgtaatcgtgacactattttaggagatttatttgaggcttttttaggagctttattattagacaaaggtgttgaagtggttcatgcctttgttaacaaggtaatgatccctcacgttgaaaaagggacctatgagcgtgttaaagattacaagacaagcttgcaagaattacttcaatctcatggggatgtaaaaatagattatcaagttactaatgaaagtggtccagcacatgcaaaggaatttgaggtgactgtatctgtcaaccaagaaaatttgagccaaggaattggacgatcaaagaaagctgctgaacaagacgctgccaaaaatgctttagcaacgttacaa

SEQ ID NO: 112 - protein, 236 aa, Streptococcus agalactiae
MIEIKEKKMKELRSKLEKDYGIVFANQELLDTAFTHTSYANEHRLLNISHNERLEFLGDAVLQLLISQYLFTKYPQKAEGDLSKLRSMIVREESLAGFSRLCGFDHYIKLGKGEEKSGGRNRDTILGDLFEAFLGALLLDKGVEVVHAFVNKVMIPHVEKGTYERVKDYKTSLQELLQSHGDVKIDYQVTNESGPAHAKEFEVTVSVNQENLSQGIGRSKKAAEQDAAKNALATLQ

SEQ ID NO: 113 - DNA, 2160 bp, Streptococcus agalactiae
atggaaaatttaaatattacacaaattgctattgatttaggtattaaagcgtcacaaatcgaaaaggttttagaattaacagatgaaggaaatactattccttttattgcccgttatcgtaaagaaatgacaggtaatttggatgaagttcaaatcaaatcaattattgaccttgataagagtatgacagctctttcagatcgtaaaactacggtcttagccaaaattgaagaacaaggaaagttgactcaagaactcaaaaaggctattgaagaagcaactaaactagcagatgttgaggaactctacctaccttataaagaaaaacgtcgtacgaaagctacgattgcacgtgaagcaggtctttttcctttagcacgtcttattttacaaaataaggataaccttgaggaagaagctcaaaactatcttacagatggttttgagacaactacgaaggcactttctggagcagtagatattcttatcgaagctttttctgaggataataaattacgttcatggacatataatgagatctggaactacagctcaatcactgcagttgttaaagatgagtcacttgatgaaaaacaggtcttcaaaatctactatgacttttctgaaaaaataagtaaactccatggctatcaagttttagcattgaatcgtggtgagaaaatgggtgttcttaaggttaattttgagcataaccttgaaaaaatgtttcgcttttttgctgttcgatttaaagaaactagccaatatatagatgaccttattgtacagactgtcaagaaaaaaatcgttccagctatggaacgccgtatccgtacagaactaagtgaaggagcagaagatggtgcaatttcactgttttcagagaatcttcgtaacttattgttagtctcaccgcttaaggggaaaatggtgttaggttttgaccctgcctttcgtacaggagcaaaattagcagtagtagaccaaactggaaaattaatgacaacacaagtgatttatccagttcctccagctaatcaagcaaaaatcgaacaatcaaaaatagagttagcaaaacttatcaaagaattcaatatagaaattattgctatagggaatggaacagcgagtcgtgaatcagaagcatttgttgcagaagttttacaagattttccagacgtatcctatgtgattgttaacgaaagtggtgcctctgtttattcagcctcagaattggcacgtcatgaatttccagacttaacggttgaaaaacgttcggccatctcaattgcaagacgtctgcaagacccattagcagaactagtcaaaattgatccaaaatctattggtgtgggtcaatatcaacatgatgttagccaaaaaaaattagcagaaaatcttgattttgttgttgaaactgtagttaaccaagtaggtgttaatgttaatacagcaagtccagccttgttagctcatgtttcaggtttaaataaaacaatatctgaaaatattgttaaatatcgtgaagagaatgggcaaattaagtcacgtgctgaaattaagaaagtgcccagattaggagcaaaagcttttgagcaagctgctggattcttacgtattcctaatgctaaaaatttcttggataatacaggtgttcaccctgagtcttatgaagctgttaaaaagttgcttgaccaactgactatcaaagaattagatgatcttgctaaagagaagttacaaaaccttgacttaattgcaacagcagaaagtattggggtaggtcaagaaacattaaaagacattatagaagatcttttgaaaccaggtcgtgatttgcgtgatgattttgaagcgcctgttttgagacatgatgttttagatgtcagtgatttaaaagttggacaggaattgcaaggaactgttcgaaacgtcgttgattttggtgcttttgttgatattggtgttcatgaagatggtctaatccaccagtctcgccttattaagcgaaaacgcgataaaaaaactagaaaaatgcctcctttacaacatccaagcaaatatctctctgttggtgatattgtaactgtttgggttgtagaggtagatgcggagcgtagcagaattggacttagtcttatcaagccagacggacttgac

SEQ ID NO: 114 - protein, 720 aa, Streptococcus agalactiae
MENLNITQIAIDLGIKASQIEKVLELTDEGNTIPFIARYRKEMTGNLDEVQIKSIIDLDKSMTALSDRKTTVLAKIEEQGKLTQELKKAIEEATKLADVEELYLPYKEKRRTKATIAREAGLFPLARLILQNKDNLEEEAQNYLTDGFETTTKALSGAVDILIEAFSEDNKLRSWTYNEIWNYSSITAVVKDESLDEKQVFKIYYDFSEKISKLHGYQVLALNRGEKMGVLKVNFEHNLEKMFRFFAVRFKETSQYIDDLIVQTVKKKIVPAMERRIRTELSEGAEDGAISLFSENLRNLLLVSPLKGKMVLGFDPAFRTGAKLAVVDQTGKLMTTQVIYPVPPANQAKIEQSKIELAKLIKEFNIEIIAIGNGTASRESEAFVAEVLQDFPDVSYVIVNESGASVYSASELARHEFPDLTVEKRSAISIARRLQDPLAELVKIDPKSIGVGQYQHDVSQKKLAENLDFVVETVVNQVGVNVNTASPALLAHVSGLNKTISENIVKYREENGQIKSRAEIKKVPRLGAKAFEQAAGFLRIPNAKNFLDNTGVHPESYEAVKKLLDQLTIKELDDLAKEKLQNLDLIATAESIGVGQETLKDIIEDLLKPGRDLRDDFEAPVLRHDVLDVSDLKVGQELQGTVRNVVDFGAFVDIGVHEDGLIHQSRLIKRKRDKKTRKMPPLQHPSKYLSVGDIVTVWVVEVDAERSRIGLSLIKPDGLD

SEQ ID NO: 115 - DNA, 426 bp, Streptococcus agalactiae
ttgactaattatgttaagaaggtgtctatagaagattttggatgtcagtttttacatactgcacattggaataatcgcttaagaacaactggaggacgcttctttccaaacgatagacaccttgactttaatcccaaaatttatcgtgagtttggtattgatatttttcgtaagattgtaagacatgagctttgccattatcatctctatatacaaggtaaaggatatcaacatagggataaagcttttaaagagttactagaaaaagtcgatggcttacgatatacccctagagttacggctgttaaagtgaattatcatcattactcttgccaatcttgcggtcaagtataccgacgtaggagacgtgttaatttacgcaagtttgcttgtggttattgtcatggtcgcttgatagagagtttt

SEQ ID NO: 116 - protein, 142 aa, Streptococcus agalactiae
MTNYVKKVSIEDFGCQFLHTAHWNNRLRTTGGRFFPNDRHLDFNPKIYREFGIDIFRKIVRHELCHYHLYIQGKGYQHRDKAFKELLEKVDGLRYTPRVTAVKVNYHHYSCQSCGQVYRRRRRVNLRKFACGYCHGRLIESF

SEQ ID NO: 117 - DNA, 285 bp, Streptococcus agalactiae
atgacgtatattggtgtacctaaagagcaaaaggcactcagtcgtaggggtaaacaattagaaaaaataaatcagggaggaaaaacacttatgtcacaaatgattcaagatttagtaggaagcacatgtatgatttatttagaggatggttctcaaactcatccttatgagattttaaaggtagatgaggattgggtacagattcgtcgcaacttgaaacgaagtaaagaggaggtgcgtattgtccgtattcatgatatcaaggaattgcgtccagtcaataaa

SEQ ID NO: 118 - protein, 95 aa, Streptococcus agalactiae
MTYIGVPKEQKALSRRGKQLEKINQGGKTLMSQMIQDLVGSTCMIYLEDGSQTHPYEILKVDEDWVQIRRNLKRSKEEVRIVRIHDIKELRPVNK

SEQ ID NO: 119 - DNA, 552 bp, Streptococcus agalactiae
atggatatatggacaaatttaggacggtttgcattcattgaaacagaacatgttaacctacgtcctgttgcctacactgatagggaagctttttggcgaatagcttcaaaaaggacaaatttacaatttatttttcctgttcaaaccagtaagaaggaaagtgattttcttttagttcattcttttatgaaagagccattgggagtttgggcgattgaagataaagttagtcataaaatgtttggagttatccgttttgaaaacattgatttatctaaaaagacagctgaaattggctattttttgaaagaaagttcttggggtcaaggcattatgactgaatgtctaaagacactttctttttttgcttttcgagagtttgggatggacaaattgatcatagtaacacataaagagaatattgctagtcagaaggttgctttgaaggcgcatttcaaacaatctaggagttttaaaggaagcgaccgttacacacgccgtataagagactatattgagtttcaattaactaggggtgattatcgttatgag

SEQ ID NO: 120 - protein, 184 aa, Streptococcus agalactiae
MDIWTNLGRFAFIETEHVNLRPVAYTDREAFWRIASKRTNLQFIFPVQTSKKESDFLLVHSFMKEPLGVWAIEDKVSHKMFGVIRFENIDLSKKTAEIGYFLKESSWGQGIMTECLKTLSFFAFREFGMDKLIIVTHKENIASQKVALKAHFKQSRSFKGSDRYTRRIRDYIEFQLTRGDYRYE

SEQ ID NO: 121 - DNA, 1101 bp, Streptococcus agalactiae
atgtcaaatataataacttatttaaaaaataattcaaacttaacttttgatgaattagcattaaacgatgttgacattctttgtttaaatgaatttggctatatttcttttgaaaaacttataaacactacagaaatgaagtcagttttagtctgtgagttatatcatgagtaccttcaaactatggctaaatcatatagctttatgttcacatcacaacgacatgatttatgtcagttaatgatgacctcgaaacgttttaaaaacttaactttatcttattatcgagctgagattagtttagaatttgaaaaacaatttgcagctatggtttttactattcctaacattaattatcatcaggttgtatttcgtggtactgatgccaaccttattggttggaaagaagattttaaattgacttatatgagagaaatatcggctcatcgttcagcgattaaatacttaaatacaatactgccttattttgataaagtagttctctcaggtcattctaaggggggtaatttagccttgtacgctgcaatgtttacaaagccagatttaaaagcaaaaattgatttgatttggcttattgactccccaggactacaaaaaactttgttacctactacagagtataaaactactaaacaaaagtgcattcgcttactaccagaagaatctattgttggtatgatgctttatagtgatatagagccgctaattattagtagcaatgcgcgtggaattctgcaacacgatgttacaacttgggaaattcaagaaccagctattttaaagactggaacaggactatcgctaaaaagtatttgttttgaaaagacatttcaacagtggatggctgaattaaaaagtcaagaaagaaaattattttttgatttattatttgatagcttcctatcaagtggcgtatctagtttggatgacttcaacttggcttccagagcaaaaatgatgaaagcttttcatagctttagagaactagatgatgataaaaaaaggttatttaacaaatctttaaaattattagtaaccatattttggggagcttatcatgataatagcagagagactaag

SEQ ID NO: 122 - protein, 367 aa, Streptococcus agalactiae
MSNIITYLKNNSNLTFDELALNDVDILCLNEFGYISFEKLINTTEMKSVLVCELYHEYLQTMAKSYSFMFTSQRHDLCQLMMTSKRFKNLTLSYYRAEISLEFEKQFAAMVFTIPNINYHQVVFRGTDANLIGWKEDFKLTYMREISAHRSAIKYLNTILPYFDKVVLSGHSKGGNLALYAAMFTKPDLKAKIDLIWLIDSPGLQKTLLPTTEYKTTKQKCIRLLPEESIVGMMLYSDIEPLIISSNARGILQHDVTTWEIQEPAILKTGTGLSLKSICFEKTFQQWMAELKSQERKLFFDLLFDSFLSSGVSSLDDFNLASRAKMMKAFHSFRELDDDKKRLFNKSLKLLVTIFWGAYHDNSRETK

SEQ ID NO: 123 - DNA, 471 bp, Streptococcus agalactiae
ataaacgagcaaggctcacttcctttcctagacagaaagggggtgagaaacatgaaaccatcttcttttcagaccacaatagaaaatcagtttgactatatctgtaaacgtgctatggaagacgagcgaaagaattatatgctttatctttcaaggattgcaaagcgtgaggtgtccttttcggatgttggcgattatcttgttagccagtttgcgacaacagataactattcaactgactttcagatttttacactcaatgggttatcagtaggcgttgaaaatgatttgttgagtgaagcattacgtgagttgccagacaagaaacgtgaaattctactgctgttttactttatggacatgagcgattcagaaattgcagacctgttgaaattgaaccgttctactgtctatcggcatagaaccagtggactagccttaattaaaaagtttatggaggaatttgaagaa

SEQ ID NO: 124 - protein, 157 aa, Streptococcus agalactiae
INEQGSLPFLDRKGVRNMKPSSFQTTIENQFDYICKRAMEDERKNYMLYLSRIAKREVSFSDVGDYLVSQFATTDNYSTDFQIFTLNGLSVGVENDLLSEALRELPDKKREILLLFYFMDMSDSEIADLLKLNRSTVYRHRTSGLALIKKFMEEFEE

SEQ ID NO: 125 - DNA, 387 bp, Streptococcus agalactiae
atgggaaatatagagttgaaaaaattggctgtaaaagcgagtgaaaatgcatacgttccttactcgaaatttccagtaggcgcagcattgcgtacagcagaaggaaaaatatttacaggatgtaacgttgaaaatatcagttatggattagcaaactgtgctgagcgtactgcaatttttaaagctgtttcagaaggttataaagatttttcggaaattgctatttatggaaatactgaagaaccaatttctccttgcggtgcatgccgtcaagtgatggtggaattttttaataagaatgctaaagttacattgattgctaaaaatggtaagacggtcgagacgacggtcggtgagttgttaccatactcgtttgttgatttaaaa

SEQ ID NO: 126 - protein, 129 aa, Streptococcus agalactiae
MGNIELKKLAVKASENAYVPYSKFPVGAALRTAEGKIFTGCNVENISYGLANCAERTAIFKAVSEGYKDFSEIAIYGNTEEPISPCGACRQVMVEFFNKNAKVTLIAKNGKTVETTVGELLPYSFVDLK

SEQ ID NO: 127 - DNA, 279 bp, Streptococcus agalactiae
atgattagtagtaattatagttatcctcttgatccttcatggaatacggaagatattactaaggtacttcgctttttaaatcaagttgaacacgcctatgaaaatagtattaaagttgatgatttgctagatagctataaagaatttaaaaaagttgttaaatccaaggcgcaggaaaaacaaattgaccgtgaattccagagaactagcggttattccacttatcaagctgttaaagcagcacaacaacaagcgaaaggatttatttcacttggacgc

SEQ ID NO: 128 - protein, 93 aa, Streptococcus agalactiae
MISSNYSYPLDPSWNTEDITKVLRFLNQVEHAYENSIKVDDLLDSYKEFKKVVKSKAQEKQIDREFQRTSGYSTYQAVKAAQQQAKGFISLGR

SEQ ID NO: 129 - DNA, 1290 bp, Streptococcus agalactiae
atgtatatcattaaaaacggattgattatcgaccctcaaagtggttttaatcaagtatcagacatgctgattgatcaaggaaaaattaaacaaatatcgaaagaaattgatattaaaggcattccaatcattgatgcaagcaataaaattgtagctccaggattagtcgatattcatgtacattttcgtgagcctggacagacacataaagaaaatatccatacaggggccctatcagctgcagtaggtggttttacgacagttcttatgatggccaatactaacccaacgatttctagcccagaaattgtaaaacaagttaaggagagtgcagcaaaagaagcaattaagattgaaacagttgctacaattactaaatctctgaatggtaaagatttagttaatttcgaagaactattagaggctggagttgctggattctcagacgatggtattcctttgacagatactaaggttttgcaagaagctatgaacttagctagaaaacatgatgttgtcctatcgttacatgaagaagatccatcgttaaatggtgtccttggtatcaacgaacatattgctcagaaaatttatcatgtctgtggagctagtggtcttgctgaatattcaatgattgcgcgagatgctatgattgcttaccaaacacaggcgaaagtccatatccagcatttgtcaagttcagaatcagtagaagtagttgattttgcgcagaagcttggtgctaacttaacagcagaagtaaccccccaacatttttcaaagacagagaacttacttttaactaagggtgctaatgcaaaattaaacccaccactgcgacttgaaaaggatagacaagccctcattgatggacttaaaagtggtgttatttcaattattgcaagtgaccacgctccccatcatattatggagaaagcagcagataatattagtcaagcgccctctggtatgactggcttagagacatcattagccttagggattacttatttagtatctactaaagaactctcaatgattgactttttggcaaaaatgacatgtaatcctgcacagttatatggatttgatgcaggttatctcagagaaggtggacctgcagatatcgttatttttgatcaagctgaagagagaataataaaggcagaatttgcctccaaatccagcaactctccttttatcggtgataaattgaagggagttattcactacacaatttgcaatggtgaaatagtctatcaaaaagatagccacgcagcgacattggta

SEQ ID NO: 130 - protein, 430 aa, Streptococcus agalactiae
MYIIKNGLIIDPQSGFNQVSDMLIDQGKIKQISKEIDIKGIPIIDASNKIVAPGLVDIHVHFREPGQTHKENIHTGALSAAVGGFTTVLMMANTNPTISSPEIVKQVKESAAKEAIKIETVATITKSLNGKDLVNFEELLEAGVAGFSDDGIPLTDTKVLQEAMNLARKHDVVLSLHEEDPSLNGVLGINEHIAQKIYHVCGASGLAEYSMIARDAMIAYQTQAKVHIQHLSSSESVEVVDFAQKLGANLTAEVTPQHFSKTENLLLTKGANAKLNPPLRLEKDRQALIDGLKSGVISIIASDHAPHHIMEKAADNISQAPSGMTGLETSLALGITYLVSTKELSMIDFLAKMTCNPAQLYGFDAGYLREGGPADIVIFDQAEERIIKAEFASKSSNSPFIGDKLKGVIHYTICNGEIVYQKDSHAATLV

SEQ ID NO: 131 - DNA, 684 bp, Streptococcus agalactiae
atgaaaattttgattacatcaggtggaactaccgagaaaattgataccgttaggagtatcacgaatcacgcaacaggaactttaggaaaaataattgcagaaaaatatttacgagaaggacatcaggtgacactcgtgactactaaaaatgcagtcaaaccagaatctgctaccaacttatccacatttgagattgaggacgttgactcattaataaaaaccttgaagccattagtgaaagagcatgatattttaattcatagcatggcagtgtctgactatacccccgtctacatggctgatttcgaaaaggttaaatcaagcgatcatttagatacttttttgcgcaaagataaccacgaagggaaaatatcatctgaatcagaatatcaagtcctttttctcaaaaaaacaccaaaagttatcagccttgtgaaaaaatggaatcctcaaattactctagtaggttttaaactacttgtgaacgttactaaagaaaatctttttaaagttgctcgtcatagcttaatcaaaaataaagctacgtttattttagctaatgacctcattgatattacctcaaaacatcacatagcctacctacttgaccatgataatgtgtataaagctaccaccaaagaagatattgctcaattaatttacgaaaaggtaaaaaaatatgat

SEQ ID NO: 132 - protein, 228 aa, Streptococcus agalactiae
MKILITSGGTTEKIDTVRSITNHATGTLGKIIAEKYLREGHQVTLVTTKNAVKPESATNLSTFEIEDVDSLIKTLKPLVKEHDILIHSMAVSDYTPVYMADFEKVKSSDHLDTFLRKDNHEGKISSESEYQVLFLKKTPKVISLVKKWNPQITLVGFKLLVNVTKENLFKVARHSLIKNKATFILANDLIDITSKHHIAYLLDHDNVYKATTKEDIAQLIYEKVKKYD

SEQ ID NO: 133 - DNA, 1113 bp, Streptococcus agalactiae
atgatttatttagacaatgctgctactaccgctctaaccccatctgttattgagaaaatgaccaatgtcatgacaagtaactatggtaatccatctagtatacatacctttgggcgtcaagcaaatcaacttttacgtgaatgtcgacaaattattgctgaatatctaaatgttaattcacgtgaaattattttcacttctgggggaactgagagcaacaatacagctatcaaagggtatgctcttgcaaatcagctaaaaggtaaacatattattacctctgaaattgaacatcattcagtcctacatactatgacttacttatcagagcgatttggttttgatattacttacttaaaaccaaatcatggacaaataactgcaaaagacgtgcaagaagctttacgagatgatactattatggtatctctcatgtttgttaataatgaaaccggggactttttaccaattcaagagattggtcagcttctcaggaaccaccaagctgtttttcacgttgatgccgttcaagtctttagcaaaatggaacttgatcctcattctttaggaattgactttttagctgcttctgcccataaatttcacggtccaaaaggtgttgggatactttactgtgctccccatcactttgatagtctacttcatggtggagaccaagaggaaaaaagacgtgcttcaactgaaaatataattggtattgctggaatgtctcaagctcttactgatgctacgactaacacccttaaaaattggactcacattagtcagctgagaacgacctttttagatgctatttcagaccttgacttctatcttaataacggtcaagactgcttacctcatgtacttaatataggttttcctggacagaataatggcttgttattgacacaattagatttagctggattcgcagtttcaacaggttctgcatgtactgcaggaacagtcgaacctagccatgtcttaacaagcttgtacggagccaactcaccacgtctaaatgaatcaatacgtattagtttttcagaactaaatacccaagaagaaattcttgaattagctaaaaccttaagaaaaattataggagat

SEQ ID NO: 134 - protein, 371 aa, Streptococcus agalactiae
MIYLDNAATTALTPSVIEKMTNVMTSNYGNPSSIHTFGRQANQLLRECRQIIAEYLNVNSREIIFTSGGTESNNTAIKGYALANQLKGKHIITSEIEHHSVLHTMTYLSERFGFDITYLKPNHGQITAKDVQEALRDDTIMVSLMFVNNETGDFLPIQEIGQLLRNHQAVFHVDAVQVFSKMELDPHSLGIDFLAASAHKFHGPKGVGILYCAPHHFDSLLHGGDQEEKRRASTENIIGIAGMSQALTDATTNTLKNWTHISQLRTTFLDAISDLDFYLNNGQDCLPHVLNIGFPGQNNGLLLTQLDLAGFAVSTGSACTAGTVEPSHVLTSLYGANSPRLNESIRISFSELNTQEEILELAKTLRKIIGD

SEQ ID NO: 135 - DNA, 630 bp, Streptococcus agalactiae
atggataagtctattcctaaagcaactgctaaacgtttatcactgtactaccgtatttttaaacgttttaatactgatggcatcgaaaaagctagttccaaacaaattgcagatgccctaggtatcgattctgctactgttcgacgtgatttttcttattttggtgaactaggacgccgtggttttggttatgatgtcaaaaaacttatgaacttctttgcagaaatattgaacgatcattctacaacaaatgttatgttggtggggtgtggaaatatcggtagagctctcttgcattatcgtttccacgatcgcaataaaatgcaaatttcaatggcttttgatttagatagcaatgatttagttggtaaaacaaccgaagatggcattcctgtctacggtatttcgactatcaatgaccatttaatagatagtgatattgaaactgctatcctaacagtacctagtacagaagcccaagaagttgctgacatcttagtcaaagcaggtataaaaggcatcttgagtttttctccagttcatttaacattaccaaaagatatcattgttcagtatgtagatttaacaagcgaattacaaactttactttatttcatgaaccagcagcaa

SEQ ID NO: 136 - protein, 210 aa, Streptococcus agalactiae
MDKSIPKATAKRLSLYYRIFKRFNTDGIEKASSKQIADALGIDSATVRRDFSYFGELGRRGFGYDVKKLMNFFAEILNDHSTTNVMLVGCGNIGRALLHYRFHDRNKMQISMAFDLDSNDLVGKTTEDGIPVYGISTINDHLIDSDIETAILTVPSTEAQEVADILVKAGIKGILSFSPVHLTLPKDIIVQYVDLTSELQTLLYFMNQQQ

SEQ ID NO: 137 - DNA, 1200 bp, Streptococcus agalactiae
atgaatgaatttgaagatttgctaaacagtgttagcgaagtgaatcctggtgacgttgtcactgcggaagttttaacagttgataacggtcaagcaaacgttgttatcgatggtactggtgttgaaggtgtcttgacacttcgtgaattgactaacgatcgtgatgctgatatcaatgattttgttaaagctggcgacacagttgaagtacttgttcttcgtcaagttgtaggtaaagatactgatacagtaactttccttgtatctaaaaaacgcttggaagctcgtaaagcatgggacaaacttgttggtcgtgaaggtgaagttgttactgttaaaggtacacgtgctgttaaaggcggactttcagttgaatttgaaggacttcgtggtttcatcccagcttcaatgattgatactcgttttgtacgtaatactgaaaaatttgttggacaagaatttgatgctaaaatcaaagaagttgatgcagcagaaaatcgcttcatcctttcacgtcgtgaagttgttgaagaatcagcagctgcagcacgtaaagaagttttctcaaacattgaagtaggttcagttgtaactggtaaagttgctcgtttaacaagctttggtgctttcattgaccttggtggtgttgatggacttgtacacgtaactgaattatcacatgagcgcaatgtttcacctaaatcagttgtaactgttggtgaagaagttgaagttaaagtactttcaattgatgaagaagctggtcgtgtatcactttcacttaaagcaactacacctggcccatgggatggcgttgaacaaaaacttgctgctggtgatgttattgaaggtaaagtaaaacgcttgactgactttggtgcttttgttgaagtgttacctggcattgatggacttgtacacatttcacaaatttcacacaaacgtgttgaaaatcctaaagacgtattatctgcaggacaagaagttactgttaaagttcttgaagttaattcagatgcagaacgtgtctcactttcaatgaaagctcttgaagagcgtccagcgcaagcagaaggtgaaaaagaagaaaaacgtcaatcacgtccacgtcgtccacgtcgtcaagaaaaacgcgactacgagcttccagaaacacaaactggattctctatggctgacttattcggtgatattgaatta

SEQ ID NO: 138 - protein, 400 aa, Streptococcus agalactiae
MNEFEDLLNSVSEVNPGDVVTAEVLTVDNGQANVVIDGTGVEGVLTLRELTNDRDADINDFVKAGDTVEVLVLRQVVGKDTDTVTFLVSKKRLEARKAWDKLVGREGEVVTVKGTRAVKGGLSVEFEGLRGFIPASMIDTRFVRNTEKFVGQEFDAKIKEVDAAENRFILSRREVVEESAAAARKEVFSNIEVGSVVTGKVARLTSFGAFIDLGGVDGLVHVTELSHERNVSPKSVVTVGEEVEVKVLSIDEEAGRVSLSLKATTPGPWDGVEQKLAAGDVIEGKVKRLTDFGAFVEVLPGIDGLVHISQISHKRVENPKDVLSAGQEVTVKVLEVNSDAERVSLSMKALEERPAQAEGEKEEKRQSRPRRPRRQEKRDYELPETQTGFSMADLFGDIEL

SEQ ID NO: 139 - DNA, 459 bp, Streptococcus agalactiae
atgaaaaatagagattttagggttagagaacagctcgaaacattcggagtcagagtttctgctttaatcatagaaaatcaaaaactgctattaatatatgctcctcatctcgataaatactatttgccaggtggggcgcttcaagttggagaagatagcaataaggctgttgcgagagaagtacttgaggaaataggtcttcacagccaagttggtgatttagcctatattattgagaatcagtttaatattaagagacatcattatcactcagttgaatttttatattttgttaatctcttgggtcaggcgccagaatctatcaaagaaggaacgcataagcgacattttgtatggcttccaataaaagaattaacaaaaattgattgtaatcctaattttttagcacaggatttgatagaatggccaggtcatgttgtgcataaaattgttcaaaat

SEQ ID NO: 140 - protein, 153 aa, Streptococcus agalactiae
MKNRDFRVREQLETFGVRVSALIIENQKLLLIYAPHLDKYYLPGGALQVGEDSNKAVAREVLEEIGLHSQVGDLAYIIENQFNIKRHHYHSVEFLYFVNLLGQAPESIKEGTHKRHFVWLPIKELTKIDCNPNFLAQDLIEWPGHVVHKIVQN

SEQ ID NO: 141 - DNA, 408 bp, Streptococcus agalactiae
atgaaagcaattgaaatttatatgaatattaatggtcgtggggccgaagctattacattttatgaagaggcttttaatacaaaagcagaacacgtcacaacttttgcacagggttggccagattgtccgccagaacttgaacatttaattatgaacgctcaatttaatattgatggtattcgaatgcaactttctgacaataatcctatttttgattttcaaattggacaaaatatgacagcagctttaattgtggaatctgtagaagaagcgcaagagttattcaataagctttctcgagatgcaatgaacattaaaatgcctctacaagcagttccgtggagtccagcttatggaaatgtgactgacaaatatggtatgacatggcaaatcaatactgagcttagc

SEQ ID NO: 142 - protein, 136 aa, Streptococcus agalactiae
MKAIEIYMNINGRGAEAITFYEEAFNTKAEHVTTFAQGWPDCPPELEHLIMNAQFNIDGIRMQLSDNNPIFDFQIGQNMTAALIVESVEEAQELFNKLSRDAMNIKMPLQAVPWSPAYGNVTDKYGMTWQINTELS

SEQ ID NO: 143 - DNA, 235 bp, Streptococcus agalactiae
atgtcaacatttaaacgctatgatgaagaattcaaacaatctcttgttaacctttatcaaactggaaaaactcagtctgaactctgtaaagactatggggtatccacttctacgcttgcaaaatggatcaaacagtattcccaagtcaaactcgaagataattctgtacttactgccaagcaaatacaagagttacaaaaacgtaatgcgcagcttgaagaggagaaccttatcc

SEQ ID NO: 144 - protein, 78 aa, Streptococcus agalactiae
MSTFKRYDEEFKQSLVNLYQTGKTQSELCKDYGVSTSTLAKWIKQYSQVKLEDNSVLTAKQIQELQKRNAQLEEENLI

SEQ ID NO: 145 - DNA, 777 bp, Streptococcus agalactiae
atgtgtcgctggctgaatatgccacactcaagttattactatcaagccgtggagtcagtatctgaaacggagtttgaagaaactattaaaagaattttcctcgatagcgagtccagatacggatccagaaaaatcaaaatatgcttgaataacgaaggtatcacactttcacgtcgtcggattcgacgcattatgaagcgactcaatttggtttctgtttatcagaaagccaccttcaaaccacattctagaggcaagaatgaagcccctattcccaaccacttagacaggcaatttaagcaagaaagaccactacaggccttagtcactgacttaacctatgttcgtgtaggcaatcgttgggcttatgtttgcctcatcattgacctatacaaccgtgaaatcatcggcctgtctcttggttggcacaagaccgctgaactcgttaagcaagccatacaaagcatcccttacgccctgaccaaagtcaagatgttccattcagatcgtagcaaagagtttgataatcagttaattgatgaaatattggaagcctttggaatcacacgttcgcttagtcaggctggttgtccttatgacaatgccgtagctgaaagtacgtatcgtgctttcaaaattgaatttgtttatcaagaaacctttcaattgctggaagaactagctcttaagactaaagactatgttcattggtggaattaccaccgcattcatggtagtctcaactaccaaacaccaatgactaaaagattaattgcc

SEQ ID NO: 146 - protein, 259 aa, Streptococcus agalactiae
MCRWLNMPHSSYYYQAVESVSETEFEETIKRIFLDSESRYGSRKIKICLNNEGITLSRRRIRRIMKRLNLVSVYQKATFKPHSRGKNEAPIPNHLDRQFKQERPLQALVTDLTYVRVGNRWAYVCLIIDLYNREIIGLSLGWHKTAELVKQAIQSIPYALTKVKMFHSDRSKEFDNQLIDEILEAFGITRSLSQAGCPYDNAVAESTYRAFKIEFVYQETFQLLEELALKTKDYVHWWNYHRIHGSLNYQTPMTKRLIA

SEQ ID NO: 147 - DNA, 426 bp, Streptococcus agalactiae
tatctttctcctgttctggatggctataatagcgaaattattgattttaccttatcccgctctccaaacctcatacaagtcaagaccatgcttgagaaggtcttccctgaggaaacttacccaaataccattctccatagtgaccaaggttggcaataccaacatgaagtctatcaccgctttcttgcaagtaaaggcatacatccttccatgtctcgcaaagggaccagcacggataatggtatgatggaatccttctttggtgtcttgaagaaagagatgttttatggctttgagaagactttcaagtctctggatcaactggagcaagctatcaccgagtatattttttactacaacaataaatgcattaaagaaaaactaaaaggacttagtcctgttcagtatagaattaaatcctttcaa

SEQ ID NO: 148 - protein, 142 aa, Streptococcus agalactiae
YLSPVLDGYNSEIIDFTLSRSPNLIQVKTMLEKVFPEETYPNTILHSDQGWQYQHEVYHRFLASKGIHPSMSRKGTSTDNGMMESFFGVLKKEMFYGFEKTFKSLDQLEQAITEYIFYYNNKCIKEKLKGLSPVQYRIKSFQ

SEQ ID NO: 149 - DNA, 354 bp, Streptococcus agalactiae
atgatttataagtcaggtagtcctatgcgggctacctttttacaattgaaggagaatataatgaaattttttcaaaagaaaaaacaaaaccaggatcaattcaaacgactgattcatcgactatcagagatgtcagatagtgaactaaccaaagtagaacaactcctagatgtggtttttgatacaaattttaagcctgatacgagcgttgaattatctcaaagcgatataactgacgaggatcaaagtcttgataggtcaatccaggaagcgaaaaataaacttcacacggaacaattggaaaaaaacattgagaggtttagacaaggtaggcgagagagcaataataacaaa

SEQ ID NO: 150 - protein, 118 aa, Streptococcus agalactiae
MIYKSGSPMRATFLQLKENIMKFFQKKKQNQDQFKRLIHRLSEMSDSELTKVEQLLDVVFDTNFKPDTSVELSQSDITDEDQSLDRSIQEAKNKLHTEQLEKNIERFRQGRRESNNNK

SEQ ID NO: 151 - DNA, 498 bp, Streptococcus agalactiae
atgagtgaagcaattattgcaaaaaaagctgaacaagttgaacttattgctgagaaaatgaaagcagcagcaagtatcgttgttgttgattcacgtggtcttactgttgagcaagatactaacttacgtcgttcacttcgtgaaagcgatgttgagtttaaagttatcaaaaactcaattttaactcgtgcagctgaaaaagcaggtcttgaagaccttaaagaactttttgttggtccatcagcagttgcgttttctaacgaagatgttattgcaccagctaaagttattagcgatttcgctaaagatgcagaagctcttgaaatcaaaggtggttcagtagacggtaaattcacttcagttgaagaaattaacgctcttgctaaattaccaaacaaagaaggtatgctttcaatgctcctttcagtacttcaagcgccagtacgcaacgttgcatatgctgtcaaagcagttgcagaaaaagacgaagaagtggca

SEQ ID NO: 152 - protein, 166 aa, Streptococcus agalactiae
MSEAIIAKKAEQVELIAEKMKAAASIVVVDSRGLTVEQDTNLRRSLRESDVEFKVIKNSILTRAAEKAGLEDLKELFVGPSAVAFSNEDVIAPAKVISDFAKDAEALEIKGGSVDGKFTSVEEINALAKLPNKEGMLSMLLSVLQAPVRNVAYAVKAVAEKDEEVA

SEQ ID NO: 153 - DNA, 1170 bp, Streptococcus agalactiae
atgaaaataggaattgataagattggttttgcaaccagtcaatatgtccttgaaatgactgatttggctattgctcgccaagttgaccctgaaaaattcagcaagggattattgttagattcacttagtattacgccagttacagaagatatcgttacacttgcagcttctgcagctaatgatattttatctgatgaggacaaagaaactattgatatggtgattgtcgctacagaatcaagtatcgatcagagtaaggcggcttctgtctatgtacatcaacttttagagattcaacctttcgcaaggtcattcgagatgaaagaagcatgctatagcgcaactgctgctcttgattacgctaaattacatgtagaaaaacatccagattctaaagtattagtgatagcttcagatattgctaaatatggcattaaatctactggagaatccactcaaggtgcaggcagtatcgctatgcttattagtcaaaatccatccattctagagctaaaagaggaccatctagcgcaaacccgtgatattatggacttttggcgaccaaattattctgatgttccttatgttaatggcatgttttcaacaaaacaatatctagatatgctaaaaactacttggaaagtatatcaaaaacgttttaatactagtctaagtgactatgctgctttttgtttccatattccttttccaaaattagctttaaagggctttaataaaattctagataataacttagatgaacaaaagaaagctgaactacaagaaaattttgagcactctattacctatagtaagaaaattggaaattgctatactggctcattgtatctaggacttctatcgttactagaaaatagtcaaaatttaaaagcaggtgatcaaattgccttcttttcatacggtagcggagctgttgctgaaatttttaccggtcagttagtagacggctaccaaaataaacttcagagcgatcgtatggatcaactcaataaacgtcaaaaaattacagtaactgagtatgagaaactcttctttgaaaaaacaatcctagacgaaaatggaaatgctaacttcaacacctaccggactggcactttttctctagactctatttgcgaacatcaacgtatctacaagaaaattaataat

SEQ ID NO: 154 - protein, 390 aa, Streptococcus agalactiae
MKIGIDKIGFATSQYVLEMTDLAIARQVDPEKFSKGLLLDSLSITPVTEDIVTLAASAANDILSDEDKETIDMVIVATESSIDQSKAASVYVHQLLEIQPFARSFEMKEACYSATAALDYAKLHVEKHPDSKVLVIASDIAKYGIKSTGESTQGAGSIAMLISQNPSILELKEDHLAQTRDIMDFWRPNYSDVPYVNGMFSTKQYLDMLKTTWKVYQKRFNTSLSDYAAFCFHIPFPKLALKGFNKILDNNLDEQKKAELQENFEHSITYSKKIGNCYTGSLYLGLLSLLENSQNLKAGDQIAFFSYGSGAVAEIFTGQLVDGYQNKLQSDRMDQLNKRQKITVTEYEKLFFEKTILDENGNANFNTYRTGTFSLDSICEHQRIYKKINN

SEQ ID NO: 155 - DNA, 516 bp, Streptococcus agalactiae
atggaatactttaacgttggaaaaattgtcaatacacaaggattacaaggcgaaatgcgtgtattaagcgtgactgactttgtagaagaacgctttaaaaaaggtcaagtgttagctttattcgatgaaaagaatcagtttgttatggatattgaaattgctagtcatcgtaagcagaagaattttgacattataaaattcaaaggaatgtatcatattaatgatattgaaaaatataaaggtttcacactgaaggtggcagaggatcaactgagcgaccttaaagatggtgaattttattatcatgaaattattggcttagatgtctatgaaggggaagagctgattggaaaaatcaaagaaattttacaaccaggagcaaatgacgtttgggttgtggaacgtcatggaaaacgtgatcttttattaccctatatcccgccagtagtattagaagtggacctttctaatcagcgtgttcaagttgaattgatggaaggtttagatgatgaagat

SEQ ID NO: 156 - protein, 172 aa, Streptococcus agalactiae
MEYFNVGKIVNTQGLQGEMRVLSVTDFVEERFKKGQVLALFDEKNQFVMDIEIASHRKQKNFDIIKFKGMYHINDIEKYKGFTLKVAEDQLSDLKDGEFYYHEIIGLDVYEGEELIGKIKEILQPGANDVWVVERHGKRDLLLPYIPPVVLEVDLSNQRVQVELMEGLDDED

SEQ ID NO: 157 - DNA, 282 bp, Streptococcus agalactiae
atgaatcttgctaacttgcaacttttcgcccacaaaaaaggtggaggttctacatcaaacggacgtgattcacaagcaaaacgtcttggagctaaagcagctgacggacaaacagtatcaggtggatcaattctttaccgtcaacgcggtacacacatctatccaggtgctaacgttggacgtggtggggacgatacactttttgctaaagttgaaggtgttgttcgtttcgaacgtaaaggacgcgataaaaaacaagtgtctgtttacccaatcgcaaaa

SEQ ID NO: 158 - protein, 94 aa, Streptococcus agalactiae
MNLANLQLFAHKKGGGSTSNGRDSQAKRLGAKAADGQTVSGGSILYRQRGTHIYPGANVGRGGDDTLFAKVEGVVRFERKGRDKKQVSVYPIAK

SEQ ID NO: 159 - DNA, 1212 bp, Streptococcus agalactiae
atgcagtattcagaaattatgattcgttatggagaactctctactaagaagaaaaaccgtatgcgcttcatcaataagttaaaaaataatatggagcatgtactctccatttatccagatgtttcagtaaaaacagatcgtgatagaggacatgtatatctcaatggtacagattatcatgaagttgcagagtccttaaaagagatttttggtatccaagctttttctccatcttttaaagtagaaaaaaatgttgatacattggtaaaagctgtccaggaaattatgacttccgtttataaagatgggatgacttttaaaattaccgcaaaacgtagtgaccactcatttgaattggatagccgtgctctaaatcatactttaggagatgctgttttttcagtcttgccaaatattaaggctcagatgaagcaaccagatatcaatcttaaagtcgagatacgagatgaggctgcttatatttcatatgaggatattaggggtgcaggaggattaccagtaggaacatctggaaaagggatgctgatgttgtctggtgggattgattctccggtagcaggttacctagcgttaaaacgtggtgtagatatagaagcagtccattttgcaagtcctccttatactagcccaggtgcattgaaaaaagcacatgatttaacacgtaaattgacaaaatttggtggtaatattcaatttattgaagttccattcacagaaattcaagaggaaattaaggcaaaagctcccgaagcctacttgatgacgttaacacgtaggtttatgatgcgtattacagatcgtattcgtgaggaccgaaatggtcttgttattattaacggtgaaagtttaggacaggtggcaagccaaacgttagaaagtatgcaagctattaatgctgtcactgcaacaccgattattcgtcctgtggtcacgatggataagctagaaattattgatattgctcaaaaaatagatacttttgatatttcaattcaaccatttgaggattgctgtacgatttttgcaccagatcgcccaaaaactaaccctaaaattaagaatacagaacagtatgagaaacgtatggatgtagaaggtcttgtagagagggcagttgcagggattatggtaactactattcaacctcaagcagatagtgatgatgttgatgacttgattgacgatttatta

SEQ ID NO: 160 - protein, 404 aa, Streptococcus agalactiae
MQYSEIMIRYGELSTKKKNRMRFINKLKNNMEHVLSIYPDVSVKTDRDRGHVYLNGTDYHEVAESLKEIFGIQAFSPSFKVEKNVDTLVKAVQEIMTSVYKDGMTFKITAKRSDHSFELDSRALNHTLGDAVFSVLPNIKAQMKQPDINLKVEIRDEAAYISYEDIRGAGGLPVGTSGKGMLMLSGGIDSPVAGYLALKRGVDIEAVHFASPPYTSPGALKKAHDLTRKLTKFGGNIQFIEVPFTEIQEEIKAKAPEAYLMTLTRRFMMRITDRIREDRNGLVIINGESLGQVASQTLESMQAINAVTATPIIRPVVTMDKLEIIDIAQKIDTFDISIQPFEDCCTIFAPDRPKTNPKIKNTEQYEKRMDVEGLVERAVAGIMVTTIQPQADSDDVDDLIDDLL

SEQ ID NO: 161 - DNA, 1107 bp, Streptococcus agalactiae
atggcagagaaaaaaggaaatacaacttttaatgttcaagttgcggattttattcgcaatcataaaaaacaaggtactgcaattgatgatgaggtaacagaaaaacttgttattccttttgttttagatgcagatcaaattgatgatttgttagaacgattgacagacggtggcatttcaatcacagataaagaaggcaatccttcaacaaagtatgtggtagaagggccaaaacctgaagaattgactgatgaagagctcataggaagtaattctgctaaagtcaatgacccagtacgtatgtacttgaaggaaattggtgttgttcctcttttaacgaatgaagaagaaaaagaattggctgttgcggttgctgagggagatttaatggctaaacaacgtttagctgaagcaaaccttcgtcttgttgtctcaattgcaaaacgttatgttggacgtggaatgcaatttcttgatttaattcaagagggtaacatggggctcatgaaagctgttgataaatttgattattcaaagggattcaaattttcaacttatgcaacatggtggattcgtcaagctataacacgtgcaattgcagatcaagcacgtacgattcgtattcctgttcatatggttgaaacgattaataaattggtccgtgaacaacgtaatcttcttcaagaacttggtcaagatccaactcctgagcaaatcgcagaacgcatggatatgacaccagataaagtacgtgaaatcctaaaaattgctcaagagccggtatcgctagaaacgccaatcggtgaggaagatgatagccatttgggtgatttcattgaagacgaagttattgaaaatccagtagattatactacacgtgttgttcttcgtgagcaattagatgaggttttagatactcttactgaccgtgaagagaatgttcttcgtttacgctttggtcttgacgatggtaaaatgcgtacgttagaggacgtaggtaaagtatttaatgttactcgtgagcgcattcgtcagattgaagctaaagcccttagaaaacttcgccatcctagtcgtagcaagcaacttaaagatttcatggaagat

SEQ ID NO: 162 - protein, 369 aa, Streptococcus agalactiae
MAEKKGNTTFNVQVADFIRNHKKQGTAIDDEVTEKLVIPFVLDADQIDDLLERLTDGGISITDKEGNPSTKYVVEGPKPEELTDEELIGSNSAKVNDPVRMYLKEIGVVPLLTNEEEKELAVAVAEGDLMAKQRLAEANLRLVVSIAKRYVGRGMQFLDLIQEGNMGLMKAVDKFDYSKGFKFSTYATWWIRQAITRAIADQARTIRIPVHMVETINKLVREQRNLLQELGQDPTPEQIAERMDMTPDKVREILKIAQEPVSLETPIGEEDDSHLGDFIEDEVIENPVDYTTRVVLREQLDEVLDTLTDREENVLRLRFGLDDGKMRTLEDVGKVFNVTRERIRQIEAKALRKLRHPSRSKQLKDFMED

SEQ ID NO: 163 - DNA, 1806 bp, Streptococcus agalactiae
atgggttatttctgtggaggtcatgacttggcaattgataaagaaaaaatttctgaaatcaagaacagtgttaacattgttgatgtcatcggtgaagttgtcggtttgacaaaaacaggacgcaatcatcttggtttatgcccatttcataaagaaaaaacgccatcttttaatgttatcgaagataggcagttttttcattgttttggttgtggtcgctctggtgatgtctttaaatttgtggaagattaccaacatattagttttttagatagtgtacaagttctagctgaacgttcaggaatacctctagatactaattttaaggggcaagttcctaaaaaacctaaagctaatcagtcgcttttagatattcatagagttgcttcgggattttaccatgcctatttaatgacaactaatgatggtgaacgcgctagacaataccttgccgagcgcggagtgacagaggacttaattaaacattttcaaataggattatcgccgggagggcaggattttctatatcgtcgtctggcaaaagagtttgatgaaaaaactttgatgtcttctggtttgttcaattattcagaaaatagcaatcagttttacgattcatttaataatagaattatgtttccgttaactaatgatattggtgaagtcattgcgttttcaggacgagtttggactcaagaggacattgatagaaaacaagctaaatataaaaattctcgtgccacccctatttttaataagtcttacgagctttaccatttagataaagcgcgtgctgtaattaataaagcacacgaagtttacctaatggaaggctttatggatgttattgcagcttatcgtgcaggaattgagaatgttgttgcttctatggggaccgctttaaccaatgaacatgttagacaccttaaaagatttactaagaaagttgttctgacttatgatggtgatagagctggtcaaaacgcaattgacaagtctttagaactgctatcagatatgactgttgatatcgttaggatacctaataaaatggaccctgatgaatttctacaagcaaattcagcagaagattttaaacaactcttagaaaatgggcgcatcagtaatacagagttttatatccactacttaaagcctgaaaacaccgataatttacaatctgaaattgcttatgttgaaaaaatagcgaaattaattgctaaatctccatcgataacagcacaaaattcatatattacaaaagtggctgaactcttgccagattttgattattttcaagtagaacaatcggttaataacgaacgattgcatcatagaagtcaacagcaagcttcatcttcagtacaaacaagtgctacagtgcaattaccacagacaggtaagttatcagctatcactaaaacagaaatgcaattgtttcatcgattattgaatcatccctacctgttaaatgaattccgtaatagggataatttttattttgatacaacagaaatacaagttttatatgagttgctaaaagaaagtggtgagatcacgtcttatgatttatcacaagaaagtgacaaagttaatcgtacttattatataattttagaggaacaattacctgtagaagtatctattggagagattgaagccgtcgaaaaggcacgtgaccgtttattgaaagaacgtgatttaagaaaacaaagccagttaattagacaatctagtaatcaaggtgatgaagaaggagccttggctgcattagaaaatttaattgctcaaaaaagaaatatggaa

SEQ ID NO: 164 - protein, 602 aa, Streptococcus agalactiae
MGYFCGGHDLAIDKEKISEIKNSVNIVDVIGEVVGLTKTGRNHLGLCPFHKEKTPSFNVIEDRQFFHCFGCGRSGDVFKFVEDYQHISFLDSVQVLAERSGIPLDTNFKGQVPKKPKANQSLLDIHRVASGFYHAYLMTTNDGERARQYLAERGVTEDLIKHFQIGLSPGGQDFLYRRLAKEFDEKTLMSSGLFNYSENSNQFYDSFNNRIMFPLTNDIGEVIAFSGRVWTQEDIDRKQAKYKNSRATPIFNKSYELYHLDKARAVINKAHEVYLMEGFMDVIAAYRAGIENVVASMGTALTNEHVRHLKRFTKKVVLTYDGDRAGQNAIDKSLELLSDMTVDIVRIPNKMDPDEFLQANSAEDFKQLLENGRISNTEFYIHYLKPENTDNLQSEIAYVEKIAKLIAKSPSITAQNSYITKVAELLPDFDYFQVEQSVNNERLHHRSQQQASSSVQTSATVQLPQTGKLSAITKTEMQLFHRLLNHPYLLNEFRNRDNFYFDTTEIQVLYELLKESGEITSYDLSQESDKVNRTYYIILEEQLPVEVSIGEIEAVEKARDRLLKERDLRKQSQLIRQSSNQGDEEGALAALENLIAQKRNME

SEQ ID NO: 165 - DNA, 174 bp, Streptococcus agalactiae
atgtcaaaaacagtagtacgtaaaaacgaatcacttgacgatgcacttcgtcgtttcaaacgttctgtgactaaagctggtactcttcaagaatcacgtaaacgtgaattctacgaaaaaccttctgtaaaacgtaaacgtaaatcagaagcagctcgcaaacgtaaaaaattc

SEQ ID NO: 166 - protein, 58 aa, Streptococcus agalactiae
MSKTVVRKNESLDDALRRFKRSVTKAGTLQESRKREFYEKPSVKRKRKSEAARKRKKF

SEQ ID NO: 167 - DNA, 234 bp, Streptococcus agalactiae
atgtataacctattactcaccattctacttgttttatcagtattattgattatctcaattttcatgcaaccacaaaagaatccaagtagtaatgtttttgatagtagcggttctgaagccctttttgaacgtagtaaagctcgaggatttgaagcttttatgcaacgttttacaggtgttttagtctttttctggctactaatcggcttagtattatctattttatcaagtcat

SEQ ID NO: 168 - protein, 78 aa, Streptococcus agalactiae
MYNLLLTILLVLSVLLIISIFMQPQKNPSSNVFDSSGSEALFERSKARGFEAFMQRFTGVLVFFWLLIGLVLSILSSH

SEQ ID NO: 169 - DNA, 243 bp, Streptococcus agalactiae
atgagaacatttgggaactccctgagtggtcccttggttgtgatcttatcttctatactatttagctggtctcacttacatggtctatctgtcgtcgactttgttgtctattttggtatgggtttgattttcgctagtttgcaccactatacaaaatccattcattattcgattggcgagcatattgtttggaatagtttgtcatatattttttattttctaacatttttgcttgatttactc

SEQ ID NO: 170 - protein, 81 aa, Streptococcus agalactiae
MRTFGNSLSGPLVVILSSILFSWSHLHGLSVVDFVVYFGMGLIFASLHHYTKSIHYSIGEHIVWNSLSYIFYFLTFLLDLL

SEQ ID NO: 171 - DNA, 786 bp, Streptococcus agalactiae
atggaacagttagaaataagaaaattgtcattacagataggagaggtccctgtactaagagattttagttgtaaaatagatatgggagaatcgctaactattattggtgagagtggttcagggaaaaccctcttggcaaaattattggttggtcacattccacaaggtatgacagttagaggaaacatattttttaagggagttgatttaggtaaactaactgtaaagcagtggcagaaattaaggggacgagatattgcctatttagtgcaaaatcccatgtctatgtttaatccttttcaaaaaattgaagcgcatattttggaaacaatccttagtcatgagaaatgttcaaagagagtagccttatctaaagcgttagaatggatgaaacgtttaaatttagatgatgcgatatccctgttaaaaaaatacccttttgagcttagtggaggaatgctacaaagaattatgttagccactatattatctcttgatcctcaggtaatcatattagatgagccgacctcagcggttgattgtcataattgttctactatatcagctattttgcaggaattgcaaaataatggaaaaaccttgattactgtaacgcatgattatcagttagctagagacctggggggacaattattagttataagtgagggagaagttgttgaacagggacaaacccaagctattttaagcaatcctcaacataactatacgaaagcactgacagtgcaaatggagtatgaaggagatattcttaatgttggtttg

SEQ ID NO: 172 - protein, 262 aa, Streptococcus agalactiae
MEQLEIRKLSLQIGEVPVLRDFSCKIDMGESLTIIGESGSGKTLLAKLLVGHIPQGMTVRGNIFFKGVDLGKLTVKQWQKLRGRDIAYLVQNPMSMFNPFQKIEAHILETILSHEKCSKRVALSKALEWMKRLNLDDAISLLKKYPFELSGGMLQRIMLATILSLDPQVIILDEPTSAVDCHNCSTISAILQELQNNGKTLITVTHDYQLARDLGGQLLVISEGEVVEQGQTQAILSNPQHNYTKALTVQMEYEGDILNVGL

SEQ ID NO: 173 - DNA, 1173 bp, Streptococcus agalactiae
atgagtccaatagatgagtttacatatattaagcaaaataagattgtttatgatagtaatagtttaatacaattgtatttcccaattatgggaagtgatgccatggcactctatgattattttgttcatttttttgatgacggaatacgacgtcataaattttcagaggttctcaatcatctgcaatacgggatgccaagatttcaagatgcattggtaatgttaacagctttggatttgttgactgtttaccaagccacaggtacttaccttgttaagttgaatcaagctatgtcaaatgagttatttttatctaatcccatctatcgtcgtttgttagaaaaacgtataggagaggtagcagtggcagaattagatatgaaaatacctaaaaatgctagagatatctctaaaaaatttacagatgttttctcggatttaggacaaccaaaacaagaggtaaaccggagtaaaaatgtttttgacttggaaagtttcaaacgtttgatgatgcgagatggcttacgttttaacaatgaaaaagatgatgtcttaggtatttatagtgtatcagaactttatcatttaaattggtatgatacctatcaattagcaaaacaaacagctatcaatggaatgattgcgcctcagcgaatgaaagttcaacaaaatgaggggcagcatattaaagataatcagagttttacaaataatgaaaaggtcatactaagggaatctaaaaatgatagtgctctagtgttccttgaaaaaatcaagagaagccgtaaggcagtgacaacaagtggtgagaagactttacttgaggatttggcaaaaatgaatttcctagacgaagtcattaatgttatggttttatataccttgaataagacaaaatctgctaacttaaataaggcctatatcatgaaagttgctaatgattttgcttttcagaatgttatgacggccgaagatgctgtgcttaaaattcgtgatttttcagatcaaaaagtaaggactaaaacagaaacgaagaagaaacaatcgaatgttcctgaatggagtaatcctgattataaagatgaggttagcccagaaaaagaaattgaattagaacagtttaaaacagatgccctcaagcgtttagaacgattaggaaaggatggtgaatca

SEQ ID NO: 174 - protein, 391 aa, Streptococcus agalactiae
MSPIDEFTYIKQNKIVYDSNSLIQLYFPIMGSDAMALYDYFVHFFDDGIRRHKFSEVLNHLQYGMPRFQDALVMLTALDLLTVYQATGTYLVKLNQAMSNELFLSNPIYRRLLEKRIGEVAVAELDMKIPKNARDISKKFTDVFSDLGQPKQEVNRSKNVFDLESFKRLMMRDGLRFNNEKDDVLGIYSVSELYHLNWYDTYQLAKQTAINGMIAPQRMKVQQNEGQHIKDNQSFTNNEKVILRESKNDSALVFLEKIKRSRKAVTTSGEKTLLEDLAKMNFLDEVINVMVLYTLNKTKSANLNKAYIMKVANDFAFQNVMTAEDAVLKIRDFSDQKVRTKTETKKKQSNVPEWSNPDYKDEVSPEKEIELEQFKTDALKRLERLGKDGES

SEQ ID NO: 175 - DNA, 1365 bp, Streptococcus agalactiae
atgaaactaaaaaacacttatatcattatcggcttgatgctttttgcgctgttctttggagccggtaatcttatttatccagcctacttaggtatctactctggttctaattgggcgtgggctatcattgggttctgcttaacaggcgtaactttacccctacttggtgttgcagctgtggcgtactcaggagcaaccgatgttgaaagcttcaccaaacctgtctctaaaacatatgctattttctttgcagtagcactatacctatctattggacctttctttgccattcctcgaacaggggcaacctcattctcagttggtattcaacctatcttaggcgacagctccttagtcaaaattatctatggtttaattttctttggtatttcttatttcttagctattagacctagtcagattgtagatcgtattggtaaatatctaactccctttttactaactgttattagtattttaattattgcctcactcatccatccagctgctatcgttggaacaccacataacgcttcaacgaatgtcagcgatgctttcaaggatttaccattcctagcaggactgattcaggggtatggtacaatggatgcccttgcatcaattgcttttgctattatcgttattcaagcaagtaaacagtacggagcaattaccaaaaaagaaattacttctatggcacttaaatctggtgctatcgctacatttcttttagcttttatttatatttttgtaggacgtattggtgcaacttcacaaagcttgtttaaatttgcaaatggttccttcttacttcacaatactccaatagacggtgggcatgttcttagtcaatcagctaacttctatttaggaattgtgggacaagctattttaggtacggctatttttcttgcttgcttaacaacagctactggattaatcactgcttgtgcggaatacttccacaaattacttccaaagattagtcacattacttgggctacaatctttactttaattgctattacgttctattttggtggtttatcagagattatccgttggtcactaccagttctctaccttctctatccattaactatagtcttaattttcttagtcttttttgatcaaaaatttgaaagtagccgcattgtctaccaaacttctattgccgccactgctgtcgctgctttatacgatgccttatcaaaactcggcgaaatgactggtttatttaccattccatccgctttgaccacattctttactaaagttgttcctttaggtgaatattctatgggatggattagttttgcaatttgtggtgtcttagttggtcttattctaaaaaaagtaaaagca

SEQ ID NO: 176 - protein, 455 aa, Streptococcus agalactiae
MKLKNTYIIIGLMLFALFFGAGNLIYPAYLGIYSGSNWAWAIIGFCLTGVTLPLLGVAAVAYSGATDVESFTKPVSKTYAIFFAVALYLSIGPFFAIPRTGATSFSVGIQPILGDSSLVKIIYGLIFFGISYFLAIRPSQIVDRIGKYLTPFLLTVISILIIASLIHPAAIVGTPHNASTNVSDAFKDLPFLAGLIQGYGTMDALASIAFAIIVIQASKQYGAITKKEITSMALKSGAIATFLLAFIYIFVGRIGATSQSLFKFANGSFLLHNTPIDGGHVLSQSANFYLGIVGQAILGTAIFLACLTTATGLITACAEYFHKLLPKISHITWATIFTLIAITFYFGGLSEIIRWSLPVLYLLYPLTIVLIFLVFFDQKFESSRIVYQTSIAATAVAALYDALSKLGEMTGLFTIPSALTTFFTKVVPLGEYSMGWISFAICGVLVGLILKKVKA

SEQ ID NO: 177 - DNA, 1209 bp, Streptococcus agalactiae
atgaagatatttgataaatcaatgaagctggaacatgtagcttatgatattagaggccctgttttagaagaggcggaccgcatgagggcaaatggtgaaaagatattgcggttaaatactggaaatccagctgcctttggcttcgaagcgccagatgaagtcattcgtgatttaattacgaatgcgcgtgaatcagaaggttactctgattcgaaaggtattttttcagctcgtaaggctgttatgcagtattaccagttacaaaacatccatgttgacatggatgatatatacattgttaatggtgttagtgagggaatctctatgtcaatgcaagctttgcttgataatgatgacgaggttctagttccaatgccagattacccgttatggacagcttgtgttagccttgctggtggaaatgctgtgcattatatttgtgatgaggaagctaattggtatcctgatattgatgatatcaaatcaaaaatcacatccaaaacaaaagcaattgtcctcattaatccaaataatccaactggagcagtctatccgcgtgaaattctgcaagagattgtggatatcgctagacaaaatgacttgattattttttcagacgaggtttatgaccgtttagttatggatggaatggagcatatcccaattgcttctattgcagaggatatttttacagttactttatctggcttatctaaatcacatcgcatctgtggtttccgcgttggttggatggtattgtctggtccgcgacaacatgttaaaggttatattgaaggtttgaatatgttagctaacatgaggctgtgttcaaatgttcttgctcaacaggttattcaaacatcgttaggcggacagcaatctattgatagtatgttgttgccaggaggtcgtatctacgagcaacgtaattatatccataaagcaattaatgaaatacctggtttatctgctgtaaaaccaaatgctggactgtatcttttccctaaaattgatacagatatgtaccgtattgataatgatgaagagtttgtgcttaatttcttaaaacaagaaaaagtattactaacacacggtagaggatttaatatgaataccgctgaccattttagaattgtttacttaccacgtgttgatgaattgactgaactacaagaaaaaatggctcgctttttaagccaatacaagcgc

SEQ ID NO: 178 - protein, 403 aa, Streptococcus agalactiae
MKIFDKSMKLEHVAYDIRGPVLEEADRMRANGEKILRLNTGNPAAFGFEAPDEVIRDLITNARESEGYSDSKGIFSARKAVMQYYQLQNIHVDMDDIYIVNGVSEGISMSMQALLDNDDEVLVPMPDYPLWTACVSLAGGNAVHYICDEEANWYPDIDDIKSKITSKTKAIVLINPNNPTGAVYPREILQEIVDIARQNDLIIFSDEVYDRLVMDGMEHIPIASIAEDIFTVTLSGLSKSHRICGFRVGWMVLSGPRQHVKGYIEGLNMLANMRLCSNVLAQQVIQTSLGGQQSIDSMLLPGGRIYEQRNYIHKAINEIPGLSAVKPNAGLYLFPKIDTDMYRIDNDEEFVLNFLKQEKVLLTHGRGFNMNTADHFRIVYLPRVDELTELQEKMARFLSQYKR

SEQ ID NO: 179 - DNA, 2826 bp, Streptococcus agalactiae
atgcaagataaattaatgataagaggagcaagagctcacaatttaaaaaatataagtgtcgacattccacgagacaagttagttgtcgttacgggactatcaggatcaggtaagtctagtttggcctttgacactatctatgcagaaggacaacgtcgttacgttgaaagtctttctgcttacgcgcgccaatttttgggaaatatggaaaagcctgatgtagattctattgatggccttagtccagctatttctattgatcagaaaacaacaagtaagaatcctcgctctactgttgggactgtaacagaaattaacgattatttacgtttgctttatgctcgtgttggaaccccatattgtatcaatggtcacggagccatcacagcatcttctgtagagcaaattgtggataaggtactagcgcttccagagcgaacaaagatgcaaattttagccccaattatacgtcgaaaaaaaggacaacacaaatcaacatttgagaaaatacaaaaagatggttacgttcgtgttcgtattgatggtgatattcacgatgttactgaggtgcctgaattatcaaaaagtaagatgcacaatattgatattgtagtagatcgattaattaataaagagggcattcgttcccgcttatttgattccgttgaagcggctctacgtttgtcggatggttatgtcgttattgatacaatggatggcaatgagttattgttttcagaacattattcttgtcctgaatgtggttttactgttcctgaattagagccacgccttttttcttttaatgctccctttggttcttgtccgacctgtgatggcttaggaattaagttagaagtagatatagatttggttattccagatagaagtaagacccttagagaaggggccttagttccttggaatccaatttcatcaaattattatccaacgatgctagagcaagctatgactcaatttggtgttgatatggatacgccatttgaaaaattaagcaaggcggagcaggacctagccctatatggttcaggcgaacgagagttccatttccattatattaacgattttggaggcgagagaaatattgatttgccttttgaaggggttgtcaataatattaatcgtcgttaccatgaaactaatagcgattacacacgcaatgttatgcgagaatatatgaacgagctaaaatgtaacacttgtcatggctatcgtctcaatgatcaagcactttgcgtaagagttgggggagaagaaggtcttaatattgggcaagtctcagatttatcgatagcagaccatttagaacttttagaaacattgcgtttatcttcaaatgaacaattaattgctcgaccaattatcaaagaaatccatgaccgtctaagtttcttaaataatgttggacttaattatttaaatctgtcacgttctgcaggaacactttccgggggcgagagtcaacgtattcgtttggctactcaaattgggtctaatttatcaggtgtcctttatgtacttgatgagccgtccattggacttcatcagcgagacaatgaccgtttgattgatagtcttaagaaaatgcgtgatttgggtaatacgcttattgttgttgaacatgatgaagatacaatgatggcagctgattggttaatcgatgtgggacctggcgctggtgcgtttggtggtgagattgtggcctctggtacaccgaagcaagtagctaaaaatactaaatctattacaggacaatatttgtcaggtaagaaagtgattcctgtgccatctgaacgaagagtaggtaatggtcgctttttagaaatcaaaggtgcggcagaaaacaacctacaaaatttagatgtcaagttccctctcggtaaatttattgccgtaactggtgtctcaggttctggaaaatcaaccttaattaatagtattttgaaaaaagctgttgcgcagaagcttaaccgtaactcagataaaccaggtaaatatgtttctttagaaggcattgaatatgttgatcgattgattgatattgatcaaagtccaattggtcggactccacgttctaatcccgcaacctatacaggtgtttttgatgatattcgtgatctttttgctcaaactaatgaggcaaagattcgaggttataaaaaaggacgcttctcatttaacgtcaaaggtggacgttgtgagtcttgttctggcgatggtatcatcaaaattgagatgcattttttaccagatgtctacgttccttgtgaagtatgccacggcacgcgctataatagtgagactctggaagtacattacaaagaaaaaaatattgcacaaattcttgatatgacagtgaatgatgcagttacattttttgcagctattcctaaaattgctcgtaagttacagactattaaggatgttggtttgggatatgtcactttggggcaaccagctacaaccttatcaggaggagaagctcagcgaatgaagctggcaagtgaattacataagcgttcgacaggtaagagtctttacatattagacgaaccaacaacggggcttcatgcagatgatattgctcgtttacttaaggttttggatcgttttgtagatgatggtaatacagtgcttgttattgagcataaccttgatgttattaaaactgctgaccacattattgatcttggccctgaaggaggtattggtggcggacaaattgtagctatcggaacaccagaagaagttgctgaaaatcctaaatcctatacaggatattatttaaaagagaagttagcaaga

SEQ ID NO: 180 - protein, 942 aa, Streptococcus agalactiae
MQDKLMIRGARAHNLKNISVDIPRDKLVVVTGLSGSGKSSLAFDTIYAEGQRRYVESLSAYARQFLGNMEKPDVDSIDGLSPAISIDQKTTSKNPRSTVGTVTEINDYLRLLYARVGTPYCINGHGAITASSVEQIVDKVLALPERTKMQILAPIIRRKKGQHKSTFEKIQKDGYVRVRIDGDIHDVTEVPELSKSKMHNIDIVVDRLINKEGIRSRLFDSVEAALRLSDGYVVIDTMDGNELLFSEHYSCPECGFTVPELEPRLFSFNAPFGSCPTCDGLGIKLEVDIDLVIPDRSKTLREGALVPWNPISSNYYPTMLEQAMTQFGVDMDTPFEKLSKAEQDLALYGSGEREFHFHYINDFGGERNIDLPFEGVVNNINRRYHETNSDYTRNVMREYMNELKCNTCHGYRLNDQALCVRVGGEEGLNIGQVSDLSIADHLELLETLRLSSNEQLIARPIIKEIHDRLSFLNNVGLNYLNLSRSAGTLSGGESQRIRLATQIGSNLSGVLYVLDEPSIGLHQRDNDRLIDSLKKMRDLGNTLIVVEHDEDTMMAADWLIDVGPGAGAFGGEIVASGTPKQVAKNTKSITGQYLSGKKVIPVPSERRVGNGRFLEIKGAAENNLQNLDVKFPLGKFIAVTGVSGSGKSTLINSILKKAVAQKLNRNSDKPGKYVSLEGIEYVDRLIDIDQSPIGRTPRSNPATYTGVFDDIRDLFAQTNEAKIRGYKKGRFSFNVKGGRCESCSGDGIIKIEMHFLPDVYVPCEVCHGTRYNSETLEVHYKEKNIAQILDMTVNDAVTFFAAIPKIARKLQTIKDVGLGYVTLGQPATTLSGGEAQRMKLASELHKRSTGKSLYILDEPTTGLHADDIARLLKVLDRFVDDGNTVLVIEHNLDVIKTADHIIDLGPEGGIGGGQIVAIGTPEEVAENPKSYTGYYLKEKLAR

SEQ ID NO: 181 - DNA, 2337 bp, Streptococcus agalactiae
atgaataacaagattttagaacagttagaatttaacaaagttaaggaattgatattaccttatctcaagacagaacaatcacaagaagaattatcagagctggagccgatgacggaggctcctaaaatagaaaaaagttttaatgaaatttctgacatggaacagatttttgttgaacatcactcatttggcatagtcagcctaagttcaatctctgagagtttaaaacgcttagagctttcagctgatcttaatattcaagaacttttggctatcaaaaaagttttacagagttcttcggatatgattcacttttattctgatttggataatgtttctttccaatctttggatcgtttgtttgaaaatttggaacaattccctaatctgcaagggtcttttcaagctatcaatgatggtggttttttagaacattttgcgagtccagaattagagcgtatccgtcgtcaattaacaaacagtgaacgacgggttcgtcagattttacaggatatgcttaaggaaaaagcagagcttttatcagagaatctaatcgctagtcgtagtggacgaagtgtcctaccagtaaaaaatacttatcggaatcgtatttctggtgtggttcatgacatctcttcttcaggaagtactgtttatattgagcctcgtgctgtagttacactaaacgaagagataacgcagcttagagctgacgaacgtcatgaagaaagtcgtattttacacgcattttcagacttgttaagaccccatgtcgccactattagaaataatgcatggattcttgggcatcttgattttgtaagggctaaatatctttttatgtctgataataaggcgacgatacctgagatttctaatgacagcacgttagcattaatcaatgttcgtcatcctctgttaagtaaccctgtggctaatgacttacattttgatcaagatttaactgcaattgtcatcactggtcccaatactggtggtaagacgattatgctaaaaacactcggtttagcacaattaatgggacagtctggtttgccagtattagcggataaaggtagtaaaattgcagtatttaacaatatctttgcagatattggcgatgagcaatctattgaacaaagtctatcaactttttctagtcatatgacgcacatagtcagtattttaaacgaggctgaccacaatagtttagtcctctttgatgaactgggagcaggaacggatcctcaagaaggtgctagtttggctatggctattttagaacaccttaggttaagtaatatcaaaacgatggcgaccacgcactatccagaattaaaagcttatgggattgagacaaattttgtagagaatgcgagcatggaatttgatgccgaaacgcttagccctacgtatcgctttatgcaaggagttcctggacgatcaaatgcatttgaaattgcttctcgccttggtttagctccatttattgttaaacaagctaagcagatgacagattctgactcagatgttaaccgtattattgaacagttagaggcacagacacttgagacacgtagaagactggatcatattaaagaagttgaacaagaaaacctcaaattcaatcgtgcggttaagaaactctataatgaattttcacatgagcgcgataaagagttagaaaaaatctatcaagaagctcaagaaattgtagatatggctttgaatgagagtgatactatcttaaaaaaactcaatgataagagccaattaaaacctcacgaaattatagatgctaaggcacaaataaaaaaattagcacctcaagttgatttatcaaaaaataaagtcttaaataaggctaaaaaaattaaagcagctcgtgctcctagaattggtgatgatattatagtgactagctatggacagcgaggtaccttaactagtcaattaaaagatggacgttgggaagcacaagtgggaattatcaaaatgacattaacacaagatgaatttacccttgttagagtccaagaagaacagaaagtcaaaagtaaacagattaatgtggttaaaaaggctgatagttctggaccaagagctcgacttgatcttagaggtaaaagatacgaagaagctatgcaagagttagataattttattgatcaagcattgcttaacaatatgggacaagttgatatcattcatggtattggtacaggcgttatccgtgagggagtgacaaaatatcttcgtcgtaataagcacgttaagcattttgcttatgccccacaaaatgcagggggatctggcgccacaattgtaacgttaggg

SEQ ID NO: 182 - protein, 779 aa, Streptococcus agalactiae
MNNKILEQLEFNKVKELILPYLKTEQSQEELSELEPMTEAPKIEKSFNEISDMEQIFVEHHSFGIVSLSSISESLKRLELSADLNIQELLAIKKVLQSSSDMIHFYSDLDNVSFQSLDRLFENLEQFPNLQGSFQAINDGGFLEHFASPELERIRRQLTNSERRVRQILQDMLKEKAELLSENLIASRSGRSVLPVKNTYRNRISGVVHDISSSGSTVYIEPRAVVTLNEEITQLRADERHEESRILHAFSDLLRPHVATIRNNAWILGHLDFVRAKYLFMSDNKATIPEISNDSTLALINVRHPLLSNPVANDLHFDQDLTAIVITGPNTGGKTIMLKTLGLAQLMGQSGLPVLADKGSKIAVFNNIFADIGDEQSIEQSLSTFSSHMTHIVSILNEADHNSLVLFDELGAGTDPQEGASLAMAILEHLRLSNIKTMATTHYPELKAYGIETNFVENASMEFDAETLSPTYRFMQGVPGRSNAFEIASRLGLAPFIVKQAKQMTDSDSDVNRIIEQLEAQTLETRRRLDHIKEVEQENLKFNRAVKKLYNEFSHERDKELEKIYQEAQEIVDMALNESDTILKKLNDKSQLKPHEIIDAKAQIKKLAPQVDLSKNKVLNKAKKIKAARAPRIGDDIIVTSYGQRGTLTSQLKDGRWEAQVGIIKMTLTQDEFTLVRVQEEQKVKSKQINVVKKADSSGPRARLDLRGKRYEEAMQELDNFIDQALLNNMGQVDIIHGIGTGVIREGVTKYLRRNKHVKHFAYAPQNAGGSGATIVTLG

SEQ ID NO: 183 - DNA, 891 bp, Streptococcus agalactiae
atgaacacaatcgtcatgcaagcagataaaaaattgcaagaaaagataagaaccgatttagctcaacatcatataagtaataacaatccttatgtggtattttcagctaaaatatcaggagctactgttcttttatatacttctggaaaacttgtcttccagggttctaacgcttcacatatcgcccaaaagtatggttttattgagcaaaaagaaagttgttcctctgagagtcaagatattcccataattggtactgatgaagtgggaaatggctcttactttggtggactggcagtggtagctagttttgtaactcctaaggaccatgcttacctcaaaaaattaggtgttggtgattcaaaaacacttactgatcaaaaaattaagcaaatcgcgcctcttttggaaaaagcaattccacacaaagcattattgttatcgcctcaaaaatataatcaagtggttagtccaaataacaaacataatgctgtctccgtaaaagttgctttacacaatcaagctatcttccttcttcttcaagatggttttgaaccagaaaaaatcgttattgatgcttttactagctccaaaaactatcaaaattatttgaaaaatgaaaagaatcaatttaaacaaacgattactctggaagaaaaagctgaaaataaatatctagctgtagcggtcagttctattattgcacgtaatctattcttagaaaaccttaacaaattaagcgacgacgtaggatataaacttccaagtggagctggtcaccaatctgataaggtcgctagccaattactcaaagcttatggtatctcttcgcttgaacactgcgcaaaacttcattttgccaacaccaaaaaagcacaagcattattaaaa

SEQ ID NO: 184 - protein, 297 aa, Streptococcus agalactiae
MNTIVMQADKKLQEKIRTDLAQHHISNNNPYVVFSAKISGATVLLYTSGKLVFQGSNASHIAQKYGFIEQKESCSSESQDIPIIGTDEVGNGSYFGGLAVVASFVTPKDHAYLKKLGVGDSKTLTDQKIKQIAPLLEKAIPHKALLLSPQKYNQVVSPNNKHNAVSVKVALHNQAIFLLLQDGFEPEKIVIDAFTSSKNYQNYLKNEKNQFKQTITLEEKAENKYLAVAVSSIIARNLFLENLNKLSDDVGYKLPSGAGHQSDKVASQLLKAYGISSLEHCAKLHFANTKKAQALLK

SEQ ID NO: 185 - DNA, 927 bp, Streptococcus agalactiae
atgattaaaactaatactgttttagaactcattaaggagcaaatcaaagataatctttatcatggtgcaagcttagctatttatgaaaatggagagtggcacgaacattacttggggacaattgatggcaatgagaaagttaaagcgggattggtctatgatctagccagtgtatcaaaagttgtcggcgtgggaactttactagcaaagttagtttatcaagggactattgatattgataagccattaaggtattattaccctacgtttcatcatcagacgttaactgtaaggcaattagctacacatagcagtggaattgacccttttattccaaatcgtgatcagttgaatgctactcagctgaaagatgccattaatcatatcaaggttttggaagataaatcgtttaaatacactgatattaattttcttttacttggttttatgttagaagaggtattaggggatagtttggataaacttttcaaacgttatattttcactccttttcagatgaaagaaacctcttttggtcctagagtagaagctgttccaactgtagtcggtattaacgatggtattgtacacgatcctaaagctaaggtattaggaaagcatactggttctgcaggtttattttcaactattgatgatttacaaagattttctattcattatttaaaagatgattttgcgaagcctttgtggaataattatagtttgagtaaatcaagatcattagcttgggatatagataaggattggataaaccatactggttatactggtccttttattgcactaaattatcaaaagcaggcagcagctatttttttgacaaacagaaccttttcctatgatgaccgtccactttggattaagaaacgacgacatgtacaagaggcgataacatcgtactttgaa

SEQ ID NO: 186 - protein, 309 aa, Streptococcus agalactiae
MIKTNTVLELIKEQIKDNLYHGASLAIYENGEWHEHYLGTIDGNEKVKAGLVYDLASVSKVVGVGTLLAKLVYQGTIDIDKPLRYYYPTFHHQTLTVRQLATHSSGIDPFIPNRDQLNATQLKDAINHIKVLEDKSFKYTDINFLLLGFMLEEVLGDSLDKLFKRYIFTPFQMKETSFGPRVEAVPTVVGINDGIVHDPKAKVLGKHTGSAGLFSTIDDLQRFSIHYLKDDFAKPLWNNYSLSKSRSLAWDIDKDWINHTGYTGPFIALNYQKQAAAIFLTNRTFSYDDRPLWIKKRRHVQEAITSYFE

SEQ ID NO: 187 - DNA, 585 bp, Streptococcus agalactiae
atgaaacaattacaagaatatatagcttttgatttagagtttaacacggttggtgagcatagccatattattcaagtgtcggccgttaaatattctaatcatcaagagattgctttatttgatacttatgttcacacaaaagttccattacaaagctttattaatggtttaacaggtattacagctagagatattataggggctcctaaaattgagatagttttgacagactttcagagttttgttggagatacaccactgattggttataatgggtataaatcggatttaccccttttagttgaaaatggtttggatctaactagtcaatatcaggtggacttatatgatgaagcttttgtgagacgcagtacagatttaaatggtattgtcaaccttaaattgactactgttgctgactttttaggaataaagggtaaagcacataatagcttagaggatgcccgtatgactgcgcgtgtttatgaaaaatttctggacttggatgaaaataaaatctatttaaaacagcaaaaagaggtagcagttgatagcccatttgcgactttaggaaatttgtttgat

SEQ ID NO: 188 - protein, 195 aa, Streptococcus agalactiae
MKQLQEYIAFDLEFNTVGEHSHIIQVSAVKYSNHQEIALFDTYVHTKVPLQSFINGLTGITARDIIGAPKIEIVLTDFQSFVGDTPLIGYNGYKSDLPLLVENGLDLTSQYQVDLYDEAFVRRSTDLNGIVNLKLTTVADFLGIKGKAHNSLEDARMTARVYEKFLDLDENKIYLKQQKEVAVDSPFATLGNLFD

SEQ ID NO: 189 - DNA, 558 bp, Streptococcus agalactiae
atgaaaaaaattgatattcaagaagtgatcgttgtcgaagggaaagatgatactgctaatctgcgacgcttttacaatgttgatacctatgaaactagaggttcagcaattgatgaagatgatttagagcgtatcgaacgtttgcacaatttgcggggagttatcgtctttacagacccagattataatggcgagcgtatccgtaaaatcatcatgaatgccattccgacagtccgccatgccttcctcaatcgagacgaggcaaagccaggctcaaagaccaagggacgatctctgggtgtcgagcatgccagctttgaagatttgcagaaggcactctcaaaagtgactcagcatttcgatgatgaagatcatttcgatatcacccaagcagacctcattcgttggggattcattactgctagcgatagccgaaaacgccgtgagtatcttgggaatcaactccgtatcggctactcaaatggtaaacaactcctcaaacgcctcagactcttcggagtgaccaaggcagaagttgaagagtgtatggaggggtat

SEQ ID NO: 190 - protein, 186 aa, Streptococcus agalactiae
MKKIDIQEVIVVEGKDDTANLRRFYNVDTYETRGSAIDEDDLERIERLHNLRGVIVFTDPDYNGERIRKIIMNAIPTVRHAFLNRDEAKPGSKTKGRSLGVEHASFEDLQKALSKVTQHFDDEDHFDITQADLIRWGFITASDSRKRREYLGNQLRIGYSNGKQLLKRLRLFGVTKAEVEECMEGY

SEQ ID NO: 191 - DNA, 270 bp, Streptococcus agalactiae
atgtgggatgtcctgactggtaaggagtcagtaaggactttaaaaaaacaattggataaagaattgatacatagcgtgtacgcgccacgcaagagatctaagtttcacgatattattacgtcgcatcataaagaaatagacgaagtagccatcaacacaaagacagctattcataaagttgctaatcaattggacgaggcaataaaaggagaatttcgttcaaaggttgaggaggctattgaaagcaatcagcaaaaatataatcattta

SEQ ID NO: 192 - protein, 90 aa, Streptococcus agalactiae
MWDVLTGKESVRTLKKQLDKELIHSVYAPRKRSKFHDIITSHHKEIDEVAINTKTAIHKVANQLDEAIKGEFRSKVEEAIESNQQKYNHL

SEQ ID NO: 193 - DNA, 483 bp, Streptococcus agalactiae
atgattttgaaaatcaatgaagttttagaaaagctaggaataagtcgtgctacccttacaaggtatcgaaaaaagctgggcatatttgaagaaactaggtcaaatatcaccaaaagtcagttcaaagagttggaaaagcttgccaatcaacggcaaaagtacacaaggcaggaacgtgttgagctatctcgtaagactttcaagctgattccaaaagaaaaaatgcttgaaatcagtgataatgattcagttgggttgaaaaatctcaaaactcaatacaatcacaatcaaaaagtgattgaaaacttccagcttgaaatcaataaggtcatcaatgacggtgagctacctgataagtacctacttgatggaatggaaaagtatcaaaagcttaacatgcagatcatgtcaacgattgaaaagcaaagtccacagggtgacaggctcaaagaaatgattcaggagaagttagcacgttatggt

SEQ ID NO: 194 - protein, 161 aa, Streptococcus agalactiae
MILKINEVLEKLGISRATLTRYRKKLGIFEETRSNITKSQFKELEKLANQRQKYTRQERVELSRKTFKLIPKEKMLEISDNDSVGLKNLKTQYNHNQKVIENFQLEINKVINDGELPDKYLLDGMEKYQKLNMQIMSTIEKQSPQGDRLKEMIQEKLARYG

SEQ ID NO: 195 - DNA, 222 bp, Streptococcus agalactiae
ttgcatgacaatgtaaactatcctagccattatcaagggaaatacggtttagagtcaattgatgttctcaggaactttatgacccctgaaatgctcaaaggattttatctaggaaatgccctaaagtaccaactacggtaccgaaagaaaaacggccttgaagacctcaaaaaagcaagaaagaaccttgactggttgattgaagaaatggagaaagagaaa

SEQ ID NO: 196 - protein, 74 aa, Streptococcus agalactiae
MHDNVNYPSHYQGKYGLESIDVLRNFMTPEMLKGFYLGNALKYQLRYRKKNGLEDLKKARKNLDWLIEEMEKEK

SEQ ID NO: 197 - DNA, 306 bp, Streptococcus agalactiae
atggcatgcctctatgatacgaatttgattcaaattcatggcttgacctcctttcataaaagatttcaagtcaattataccaaactagaaaggaaaaatatgagtcaacaacagaaaaaatggattcagctagtgaaagataagctgaatgaagaacagatgacacaaacacatctagctcgttcttgtggtgttgctaaggcaactatctcagaattgctgaaatatggcaaagggagcgacaaactcaaaaataaggtatctgatgtattacacatagatgagagctggacgaggttggaggat

SEQ ID NO: 198 - protein, 102 aa, Streptococcus agalactiae
MACLYDTNLIQIHGLTSFHKRFQVNYTKLERKNMSQQQKKWIQLVKDKLNEEQMTQTHLARSCGVAKATISELLKYGKGSDKLKNKVSDVLHIDESWTRLED

SEQ ID NO: 199 - DNA, 1035 bp, Streptococcus agalactiae
atggaaacaacattaaactacattaaaaccctgacatcaatcccttcaccaacagggtttacccaaacaatcatgacctatatcatcaaagaattggaagcgtttggctactcaccaattcgcacaaacaagggaggcgtcatggtttctctaaaaggaaaaaatgatactaaacatcgcatgataactgctcaccttgatacacttggtgctatggttagggccatcaaaccagatggtcggttaaaaattgaccttattggtggatatacatacaatgccattgaaggagaaaactgtactatacacctctcaaaaaatggtaaagaaatttctggaactgctcttattcatcaaactagtgtccatgtttacaaagacgctggaactgctgaacgtaatcaaacaaatatggaaattcgtttagatgagaaagtaacaactgctgacgaaacacgtgctttaggcatccaggtcggtgatttcatttcatttgatccgcgtacaatcataacagacagcggctttattaaatcacgttacctagatgacaaggtatccgctggtatcctaatggaacttctttctgtttacaagaaagaagacattcaacttccttatactactcatttctactttagtgcctttgaagagctaggacatggagcaaattcaagcatcccaaatgaaactgtagaatatctagcagttgatatgggagctatgggagacgatcaagaaactgacgaatatactgtctctatctgtgttaaagatgcttctggtccttatcattatgaattacgtcaacatcttgtttctctagctgaaaacaataatattccttataaacttgatatttatccttattatggtagtgacgcctccgctgccatgcgtgctggtgcggaagttaaacacgcgctacttggtgcaggtattgaatctagtcattcttatgaacgtacccatatcgattctattcaagcaactgaactcttagtggatgcctatctcaaaagcaatatggtggac

SEQ ID NO: 200 - protein, 345 aa, Streptococcus agalactiae
METTLNYIKTLTSIPSPTGFTQTIMTYIIKELEAFGYSPIRTNKGGVMVSLKGKNDTKHRMITAHLDTLGAMVRAIKPDGRLKIDLIGGYTYNAIEGENCTIHLSKNGKEISGTALIHQTSVHVYKDAGTAERNQTNMEIRLDEKVTTADETRALGIQVGDFISFDPRTIITDSGFIKSRYLDDKVSAGILMELLSVYKKEDIQLPYTTHFYFSAFEELGHGANSSIPNETVEYLAVDMGAMGDDQETDEYTVSICVKDASGPYHYELRQHLVSLAENNNIPYKLDIYPYYGSDASAAMRAGAEVKHALLGAGIESSHSYERTHIDSIQATELLVDAYLKSNMVD

SEQ ID NO: 201 - DNA, 141 bp, Streptococcus agalactiae
atggatttgctaaaatgtggatatacattggatgatatagaaacagccagaccagaggatatggaacgttattatgcccctgaacaaatcagaaaatatggagctttaggaatagaattgaggttattgcatggatatttt

SEQ ID NO: 202 - protein, 47 aa, Streptococcus agalactiae
MDLLKCGYTLDDIETARPEDMERYYAPEQIRKYGALGIELRLLHGYF

SEQ ID NO: 203 - DNA, 882 bp, Streptococcus agalactiae
atgtcattttcattaaaaattagaaatccatacggtgaacataccgttaaagaactccttgaagattattttttgattccacgtaagattagacattttttgcgtgttaaaaaacatgtacttataaacaatgaatttattaattggcaaactgtcgtccaagaaaacgatactattaccttaatctttgatgatgaggattaccctactaaaaaaattcctctgggcagagcagagcttattgattgtctttatgaggatgaacatcttattatcgttaataaacctgaaggtatgaaaactcacggtaaccaaccaaatgaaatagcactgttaaatcatgtatctgcctattctggacaaacatgctatgttgttcatcgcctagatatggagaccagtggagctgttttatttgctaaaaatccatttatacttccccttatcaatcaacgcttagaacgaaaagaaatttggcgtgaatattgggctttagttgaaggaaaattttcacctaagcatcaagttttgagagacaaaattggacggaaccgtcatgacagacgtaaacgaatcattgattctaaaaacggtcaacatgctatgacaatcattgacgttttgaagtatatccaaaatagtagtctcataaaatgccgactggaaaccggaagaacccatcaaattcgcgttcacttatctcatcatggacatcccttaataggagaccccctctacaacccttcttctaataatgaaaggttaatgctacacgctcaccgattgactctatctcatccattaacttgcgaaactattagcgtagaggccccttcatctactttcgagaagattttaaacaattataaaaaaggagttgga

SEQ ID NO: 204 - protein, 294 aa, Streptococcus agalactiae
MSFSLKIRNPYGEHTVKELLEDYFLIPRKIRHFLRVKKHVLINNEFINWQTVVQENDTITLIFDDEDYPTKKIPLGRAELIDCLYEDEHLIIVNKPEGMKTHGNQPNEIALLNHVSAYSGQTCYVVHRLDMETSGAVLFAKNPFILPLINQRLERKEIWREYWALVEGKFSPKHQVLRDKIGRNRHDRRKRIIDSKNGQHAMTIIDVLKYIQNSSLIKCRLETGRTHQIRVHLSHHGHPLIGDPLYNPSSNNERLMLHAHRLTLSHPLTCETISVEAPSSTFEKILNNYKKGVG

SEQ ID NO: 205 - DNA, 834 bp, Streptococcus agalactiae
atgtttgcgtggggaagtattggatttgttagtaataaaattggaggacgtccaaatcaacaaacatttggaatgactttaggagcattgctatttgcgattatcgtatggttatttaaacagccagagatgactgcctcattgtggatttttggtatcttaggtggtatcctatggtcagtcggccaaaatggtcaattccaagcaatgaaatatatgggagtctctgttgctaatccactgtcaagtggtgcacaattagtaggtggaagcctagttggtgctttagtctttcatgaatggactaagccaatccaatttattttaggattgacagcgttgacattattagttatcggcttctatttctcaagtaaacgtgatgtctcagaacaagctttggcaacacatcaagagttttcaaaaggatttgctacaattgcttattcaactgtaggttacatctcatacgcagttttatttaataacattatgaagttcgacgctatggccgttattttacccatggctgttggaatgtgtctaggtgcaatttgtttcatgaagtttcgtgttaactttgaggctgttgttgttaaaaatatgattacaggtctcatgtggggcgttggtaatgtcttcatgttattggcagcagctaaagcagggctagcaattgcttttagtttttctcaacttggagtaattatctctattattggtggtattttatttttaggtgagacaaaaacgaagaaagagcagaagtgggttgtcatgggtatcctttgttttgttatgggtgctatattacttggtattgttaaatcttat

SEQ ID NO: 206 - protein, 278 aa, Streptococcus agalactiae
MFAWGSIGFVSNKIGGRPNQQTFGMTLGALLFAIIVWLFKQPEMTASLWIFGILGGILWSVGQNGQFQAMKYMGVSVANPLSSGAQLVGGSLVGALVFHEWTKPIQFILGLTALTLLVIGFYFSSKRDVSEQALATHQEFSKGFATIAYSTVGYISYAVLFNNIMKFDAMAVILPMAVGMCLGAICFMKFRVNFEAVVVKNMITGLMWGVGNVFMLLAAAKAGLAIAFSFSQLGVIISIIGGILFLGETKTKKEQKWVVMGILCFVMGAILLGIVKSY

SEQ ID NO: 207 - DNA, 1479 bp, Streptococcus agalactiae
atgtcaaattgggatactaagtttttgaaaaaaggttttacttttgatgatgttctgcttattcctgctgaaagccatgttttaccaaatgaagttgatatgaagacaaagttggctgataatttgacattaaacattccaatcattacagctgcaatggatacagttacagatagtaagatggctattgctattgcacgtgctggtgggcttggtatcattcataaaaatatgtcaatagttgatcaagcagaagaagttcgtaaagttaaacgctcagaaaatggtgttattattgacccattcttcttgacaccagataatactgtctctgaagctgaggaattgatgcaaaactatcgcattagtggagttcctattgtagagacactcgagaatcgtaaattagttggaattattactaaccgtgatatgcgtttcatttctgattataaacaactaatctcagagcacatgacaagtcaaaatcttgtaacagctcctattggtacagatcttgaaactgcagagcgtattcttcatgagcatcgtattgaaaagctacctttagtagatgatgagggacgtctttcaggacttattactattaaggatatcgaaaaagttattgaatttcctaaggcagcaaaagatgaatttggacgtctcttagttgcaggtgcagtaggtgtaacctctgatacttttgaacgtgcagaagctttgtttgaagcaggtgcagatgctattgtcattgatacagcacatggacattcagctggtgtgctccgtaaaattgctgaaattcgtgctcacttccctaatcgcacattgattgcgggaaatattgctacagcagaaggagcgcgtgcactttatgatgcaggtgtggatgtcgttaaagttggtattggtccaggttcaatttgtacgactcgtgtcgttgctggggtaggtgttcctcagattacagctatttacgatgcagcggctgttgcgcgtgagtacggtaagactatcattgctgatggtggtattaaatattcaggtgatattgtaaaagcacttgcagcaggtggaaatgcagttatgctaggttcaatgtttgcaggaacagatgaagcgccaggagaaacagaaattttccaagggcgtaagttcaagacataccgtggtatgggctcaattgcagcaatgaaaaaaggttcaagcgatcgttatttccaaggttctgtaaacgaggctaacaaattggttccagaaggtattgaaggtcgtgtagcatacaaaggttcagtagccgatattgttttccaaatgcttggtggcattcgctctggtatgggatatgtaggtgcagcgaacataaaagaacttcatgataatgctcaatttgttgaaatgtcaggagctggcttgaaagaaagccatccccatgatgttcaaattacaaatgaggcaccaaattattcagtacac

SEQ ID NO: 208 - protein, 493 aa, Streptococcus agalactiae
MSNWDTKFLKKGFTFDDVLLIPAESHVLPNEVDMKTKLADNLTLNIPIITAAMDTVTDSKMAIAIARAGGLGIIHKNMSIVDQAEEVRKVKRSENGVIIDPFFLTPDNTVSEAEELMQNYRISGVPIVETLENRKLVGIITNRDMRFISDYKQLISEHMTSQNLVTAPIGTDLETAERILHEHRIEKLPLVDDEGRLSGLITIKDIEKVIEFPKAAKDEFGRLLVAGAVGVTSDTFERAEALFEAGADAIVIDTAHGHSAGVLRKIAEIRAHFPNRTLIAGNIATAEGARALYDAGVDVVKVGIGPGSICTTRVVAGVGVPQITAIYDAAAVAREYGKTIIADGGIKYSGDIVKALAAGGNAVMLGSMFAGTDEAPGETEIFQGRKFKTYRGMGSIAAMKKGSSDRYFQGSVNEANKLVPEGIEGRVAYKGSVADIVFQMLGGIRSGMGYVGAANIKELHDNAQFVEMSGAGLKESHPHDVQITNEAPNYSVH

SEQ ID NO: 209 - DNA, 879 bp, Streptococcus agalactiae
atgactctatatataatagctaacccccatgctggtaataaaaatgcctccactattgttggtaaaattcaggagctttatcatactgaagatatttctgtgttctatacagaacagaaagatgatgaaaaaaaacaagtcattaatatactaaggtcttttaaagaaagtgatcatctaatgattataggaggagatggtaccttatcaaaagtaatgacttatctcccccaacatattccgtgcacttattatcctgttggttcgggaaatgattttgccagagctttgaaaattcctaacctcaaagaaacccttaccgctattcagacagaaagattaaaggaaattaattgctttatttatgataaagggctgattttgaatagtttagatttaggttttgcagcctatgtcgtttggaaagcatctaactctaaaataaaaaatattttgaatagatatcgtctaggaaaaataacttacattgttatagctatcaaatcattattacattcttctaaagtacaagtattagtggaaggagagacaggacagcagataaaactaaatgacctttattttttcgcattagcaaataacacttattttggaggtggcattactatttggcctaaagcaagtgctttaactgcagagttagatatggtttacgctaaagggcatacttttctaaaacgattaagtattttattatctttggtttttaaaaggcatactacctctaaaagtataaaacaccagactttcaaagctatgaccgtatattttcctaaaaatagtttgattgaaatagatggcgaaatagttgagttagatcagattagtttaaaatgtcaaaaaaggtatttatatatg

SEQ ID NO: 210 - protein, 293 aa, Streptococcus agalactiae
MTLYIIANPHAGNKNASTIVGKIQELYHTEDISVFYTEQKDDEKKQVINILRSFKESDHLMIIGGDGTLSKVMTYLPQHIPCTYYPVGSGNDFARALKIPNLKETLTAIQTERLKEINCFIYDKGLILNSLDLGFAAYVVWKASNSKIKNILNRYRLGKITYIVIAIKSLLHSSKVQVLVEGETGQQIKLNDLYFFALANNTYFGGGITIWPKASALTAELDMVYAKGHTFLKRLSILLSLVFKRHTTSKSIKHQTFKAMTVYFPKNSLIEIDGEIVELDQISLKCQKRYLYM

SEQ ID NO: 211 - DNA, 426 bp, Streptococcus agalactiae
ttgatgggtcgtaatcagacaaaagctgacattttattaaacgaattaagaataatcccaaaacttattaaagagcttgaacgtgataagattgcgagcaactcgctgctgtcaagtcctcagtggtcagacatgcgaacgagcggagggattagacaatcacaagaagataaaaacgtcagcttgattagtaaatgtgagtattacaacggacaaatacagacactagataaacgtaaaggcgagattgtcgaattaattatgcgtatacctgacatgctgcaacgtcatgtgttaattactacatttgtaaattgtcagacgtacgacgaagcgatcgacagattagagatgaatcgcaataactactatatgcttaagcgaaaaggtgtagaaagtctgaatttgatactaaataatactgaa

SEQ ID NO: 212 - protein, 142 aa, Streptococcus agalactiae
MMGRNQTKADILLNELRIIPKLIKELERDKIASNSLLSSPQWSDMRTSGGIRQSQEDKNVSLISKCEYYNGQIQTLDKRKGEIVELIMRIPDMLQRHVLITTFVNCQTYDEAIDRLEMNRNNYYMLKRKGVESLNLILNNTE

SEQ ID NO: 213 - DNA, 333 bp, Streptococcus agalactiae
ctgcgtgcagataaaaaaggtacccaccgggtcgcgttcgaaaaaaataaacgccggctgctaaaaaccgcccacctatgcggtatctgtggccggccagtagataagtcattgaagtatccacatccgctaagtgcagcaattgatcatattgttcctattgcaaaaggtggtcatccgtcatcaatagataacttacagttaacacattggcaatgtaataggcaaaagtctgacaagttatttatcaatcagacagccgtacgggctactgttgtaggaaatagaaacttacctcaaagccgagactggtcgtcctacgcatctaaagaa

SEQ ID NO: 214 - protein, 111 aa, Streptococcus agalactiae
MRADKKGTHRVAFEKNKRRLLKTAHLCGICGRPVDKSLKYPHPLSAAIDHIVPIAKGGHPSSIDNLQLTHWQCNRQKSDKLFINQTAVRATVVGNRNLPQSRDWSSYASKE

SEQ ID NO: 215 - DNA, 171 bp, Streptococcus agalactiae
atggataagaaaaaggttgtttcaactatcgtatctacagggtttcttatagtttcaatatcaaatttttttagagagctatcacctatactttttctcttgaatattattggatttttctgcttcctattattattttctgccaacataaataaattgttcttaaaacga

SEQ ID NO: 216 - protein, 57 aa, Streptococcus agalactiae
MDKKKVVSTIVSTGFLIVSISNFFRELSPILFLLNIIGFFCFLLLFSANINKLFLKR

SEQ ID NO: 217 - DNA, 249 bp, Streptococcus agalactiae
atgtcagtctgcttcataaaatcctcctttccaaatcacttatttggatttcataaaagttgttttaccagcaatcgaacagctttagcaaagctcacgggagttccacccctgcatggttctcatgtagccatactcattgcctgcgacggttttatcacgctcggactattgactgtatgggagtatcattatcacgataagaatgtcgttgcaggcaatcctgctaaagattgcttctcggatcac

SEQ ID NO: 218 - protein, 83 aa, Streptococcus agalactiae
MSVCFIKSSFPNHLFGFHKSCFTSNRTALAKLTGVPPLHGSHVAILIACDGFITLGLLTVWEYHYHDKNVVAGNPAKDCFSDH

SEQ ID NO: 219 - DNA, 69 bp, Streptococcus agalactiae
atgaagtacatcatatacaataaatttccttacattgggttattgtcaaaaaaagtcgtctatctgcaa

SEQ ID NO: 220 - protein, 23 aa, Streptococcus agalactiae
MKYIIYNKFPYIGLLSKKVVYLQ

SEQ ID NO: 221 - DNA, 183 bp, Streptococcus agalactiae
ataaactacaagtggatattgtgtcctgtatgtggaaataaaacacgattaaagataagggaagatactgaattaaaaaaattccccctctattgtccgaaatgcagacaagaaaatttaattgaaataaagcagttcaaagtaactgtgattacagagccagacgcaaagacgcagagccga

SEQ ID NO: 222 - protein, 61 aa, Streptococcus agalactiae
INYKWILCPVCGNKTRLKIREDTELKKFPLYCPKCRQENLIEIKQFKVTVITEPDAKTQSR

SEQ ID NO: 223 - DNA, 84 bp, Streptococcus agalactiae
atgctttgtatacctatggttatgcataaaaatcccagtgataaaagtatttatcactgggatttttatgcccttttgggtttt

SEQ ID NO: 224 - protein, 28 aa, Streptococcus agalactiae
MLCIPMVMHKNPSDKSIYHWDFYALLGF

SEQ ID NO: 225 - DNA, 144 bp, Streptococcus agalactiae
gtgagagttaaaattaatttaaagtgtagctcttgtggtagtaagaattatttaaccagtaagaataaaagtaatcatcccgataaaatcgaggttccaaagtattgcccaaaggagagaaaagtaacactacatattgaatct

SEQ ID NO: 226 - protein, 48 aa, Streptococcus agalactiae
MRVKINLKCSSCGSKNYLTSKNKSNHPDKIEVPKYCPKERKVTLHIES

SEQ ID NO: 227 - DNA, 357 bp, Streptococcus agalactiae
gtgggctatagaaaccctaaacactctgactggttcagagcttggcagattaaattctacaactcgaaaccttggagaactctgagaaataaaatcagaaaagctaagcgtatgcgttgtgacatgtgcggacgtttgattcacggtaagagtattgttgaccacatcatagagattgacgaaactaattatcaagatgaatctatcactctcaacgaagagaactgtcagttactttgtcttgaatgtcacaacacaaaaacttttcaaagtaaaataaatttaaatttagataatcggaatataaatttatttttgatttttttatttttgaatttttgtggactccccccattt

SEQ ID NO: 228 - protein, 119 aa, Streptococcus agalactiae
MGYRNPKHSDWFRAWQIKFYNSKPWRTLRNKIRKAKRMRCDMCGRLIHGKSIVDHIIEIDETNYQDESITLNEENCQLLCLECHNTKTFQSKINLNLDNRNINLFLIFLFLNFCGLPPF

SEQ ID NO: 229 - DNA, 150 bp, Streptococcus agalactiae
atggcacaaaagaaagcaagcctagcgtgtacagaatgcggaagccgaaattactcaatcggagtaagtagcacccccaagccaacacgactagaagtaaataaattttgtaaatattgtaagaagtatacaatacacaaagaaacgcgt

SEQ ID NO: 230 - protein, 50 aa, Streptococcus agalactiae
MAQKKASLACTECGSRNYSIGVSSTPKPTRLEVNKFCKYCKKYTIHKETR

SEQ ID NO: 231 - DNA, 202 bp, Streptococcus agalactiae
atggtaaaaaaattggaatatccgattgatagaatacatcagaatttagctttacgaaaagataaagttgttgtcgcatactatcgtattccaaataccccaatcactattacagatagtgataagaaagatagtcacaaaacgaaagtagcacaggttatcaaaaaattagctaaatataaaaattttgatatttcattaa

SEQ ID NO: 232 - protein, 67 aa, Streptococcus agalactiae
MVKKLEYPIDRIHQNLALRKDKVVVAYYRIPNTPITITDSDKKDSHKTKVAQVIKKLAKYKNFDISL

SEQ ID NO: 233 - DNA, 849 bp, Streptococcus agalactiae; identical to SEQ ID NO: 1

SEQ ID NO: 234 - protein, 283 aa, Streptococcus agalactiae; identical to SEQ ID NO: 2

SEQ ID NO: 235 - DNA, 120 bp, Streptococcus pyogenes
ttgatatggaattatgccttggaacgaaacctccgtatgatttcagaccgtatttcaaaaatgactggagcaaaaattatcgagaagcgttattcctaccgtgactatcaaaaatatagg

SEQ ID NO: 236 - protein, 40 aa, Streptococcus pyogenes
MIWNYALERNLRMISDRISKMTGAKIIEKRYSYRDYQKYR

SEQ ID NO: 237 - DNA, 210 bp, Streptococcus pyogenes
atgatgacggatcgagtaatgaaaaaaccaattcgaggccgtcaactcagtaaacgagatttatatgatgaagaattttttcgtacacattttgccaagatagaaattgaaagtcgattagaatttttgttgaaccgtgccaattcattagaggagctactattaaaagcaaaagaagtgaatctaaccattgacttaaaacaaaaaatg

SEQ ID NO: 238 - protein, 70 aa, Streptococcus pyogenes
MMTDRVMKKPIRGRQLSKRDLYDEEFFRTHFAKIEIESRLEFLLNRANSLEELLLKAKEVNLTIDLKQKM

SEQ ID NO: 239 - DNA, 129 bp, Streptococcus pyogenes
atgactataaaaaatcaaaaaaagtacaaaggtgtttattgtgataagaatgggaagatattttatcaagctgatcttggtgtagatccagtaacaggtaaacgagttcaaaagaaagccagaaagaat

SEQ ID NO: 240 - protein, 43 aa, Streptococcus pyogenes
MTIKNQKKYKGVYCDKNGKIFYQADLGVDPVTGKRVQKKARKN

SEQ ID NO: 241 - DNA, 219 bp, Streptococcus pyogenes
atgaaagaagcgtatgatgaactggttcggattaggtatgggtttagtaataatcttagtattgaaaatgacaatatatcgtttgaaaactatatgaatactatttacctaagagcatataagcaaaaggttcaggctgtaacttatgaaatagccttaccacatcataagttatttattcagtattttgattctaaacttttaaagggaataacagct

SEQ ID NO: 242 - protein, 73 aa, Streptococcus pyogenes
MKEAYDELVRIRYGFSNNLSIENDNISFENYMNTIYLRAYKQKVQAVTYEIALPHHKLFIQYFDSKLLKGITA

SEQ ID NO: 243 - DNA, 219 bp, Streptococcus pyogenes
atggggtatgctgaaaggttagactatatttcaaaagtgccatgtaaggctttggataatcctaaagggaaacatcccgacactccattttggacttatattgagtttcagaattttataaaatcgtttgatttgcaagattatgaagagctacaaagatttacaactatttggctatattatatgacaggtgttcgtgtaagtgaaggtttatcatta

SEQ ID NO: 244 - protein, 73 aa, Streptococcus pyogenes
MGYAERLDYISKVPCKALDNPKGKHPDTPFWTYIEFQNFIKSFDLQDYEELQRFTTIWLYYMTGVRVSEGLSL

SEQ ID NO: 245 - DNA, 147 bp, Streptococcus pyogenes
ttgaccaatcatgaaggatctactatggatattagacaattaacctattttattgcagttgctgaaacaaaaaatcattcccacgctgctaaaagtttgtttgtaacgcaacctactctttctcaatcaattaaaaggctagagtcc

SEQ ID NO: 246 - protein, 49 aa, Streptococcus pyogenes
MTNHEGSTMDIRQLTYFIAVAETKNHSHAAKSLFVTQPTLSQSIKRLES

SEQ ID NO: 247 - DNA, 294 bp, Streptococcus pyogenes
ttgaatagtcatcacacctgtcaaactcttcaagtctcccgttcaggtttctatgcttatttaaaacgtcgtccctcttcaaggcatgttgagaatgaagctttaaaggaaatgattaaagccattttctatgaacataaagagcgttacggaagtgtacgaattacccaagaactttgtagacgtggcatccatgtcaattataaacgtgttggtagactccttcatcagctaggtctctatgctaaaggaagtcgatatcaatataaatactataaccgtcgacgttcttca

SEQ ID NO: 248 - protein, 98 aa, Streptococcus pyogenes
MNSHHTCQTLQVSRSGFYAYLKRRPSSRHVENEALKEMIKAIFYEHKERYGSVRITQELCRRGIHVNYKRVGRLLHQLGLYAKGSRYQYKYYNRRRSS

SEQ ID NO: 249 - DNA, 219 bp, Streptococcus pyogenes
atgaatcgaaaaggtaatccatacgataatgcactcatggaatccttttataaaacattaaaaagagagcttgtcaatgatgctcatttcgcaactattaagcaagctcagcttgagatttttaaatatagtgagacttactataaccccaaacgtctgcattcagctttagggtatctctcacctgttgaatttgaaaaaaatagttactcattagct

SEQ ID NO: 250 - protein, 73 aa, Streptococcus pyogenes
MNRKGNPYDNALMESFYKTLKRELVNDAHFATIKQAQLEIFKYSETYYNPKRLHSALGYLSPVEFEKNSYSLA

SEQ ID NO: 251 - DNA, 138 bp, Streptococcus pyogenes
atgtttttgacctatggtttgaaagtgacctctctgaaacggacgcactttgcaggactggaactcggtcatttagccagcggagaatatcgttatctaacagcgtcagaaaggcaactcattaaaacgtatctggac

SEQ ID NO: 252 - protein, 46 aa, Streptococcus pyogenes
MFLTYGLKVTSLKRTHFAGLELGHLASGEYRYLTASERQLIKTYLD

SEQ ID NO: 253 - DNA, 417 bp, Streptococcus pyogenes
atgaatatctcaagcttggcttattttattgagattattaattgtgactttaacttaaccaaagcagcccaaaaaagtcatatttcgcaacccgcccttagtagttatatcaagactatcgaaaaagaagaaggagtcgttttattccagcgtcaaaaagggcgtctagttggactaacttcagtcggcgaacgcttttttgaaaatgctaaggtggttatcgcatcacatgagcaattaatggctgatttgcggagtgaatccaaaaaatacaaaggagaaatttcaatcggtattcctcaactcatctctggcattgttttttctgagctcattccaaaactcatcgaagaaaatcccgaagttaaatttcatattgtagaaacgggtgcttatgaactgcaaaaaaactgtttc

SEQ ID NO: 254 - protein, 139 aa, Streptococcus pyogenes
MNISSLAYFIEIINCDFNLTKAAQKSHISQPALSSYIKTIEKEEGVVLFQRQKGRLVGLTSVGERFFENAKVVIASHEQLMADLRSESKKYKGEISIGIPQLISGIVFSELIPKLIEENPEVKFHIVETGAYELQKNCF

SEQ ID NO: 255 - DNA, 189 bp, Streptococcus pyogenes
ttggctaatccaaacggttctgtcacgattcacgctaaaattggaactgttgagacttgtatcacagacaattcagatcagaccttagtaacttacaacttaaatgtagtagcttataatacaaataacgaagataatattgcggttgctgttatgtatccacatattacgaatatatcggcaaagatg

SEQ ID NO: 256 - protein, 63 aa, Streptococcus pyogenes
MANPNGSVTIHAKIGTVETCITDNSDQTLVTYNLNVVAYNTNNEDNIAVAVMYPHITNISAKM

SEQ ID NO: 257 - DNA, 261 bp, Streptococcus pyogenes
atggcaacaggatttagtggtggtaagctgggtgactttatcattcatcagttacaagaacagggcatttctaaccaatttttcaaaatcaaaggggaaacgagaaattgtattgctgttttacatgaaggcatgcagacaaaaattttggaagctggtccctacagtgatgtggacgaagccgaagtctctttgagccacatgagtactattgctaagccgtttgatgtcttaacttctcaggcagtctgcctaggagac

SEQ ID NO: 258 - protein, 87 aa, Streptococcus pyogenes
MATGFSGGKLGDFIIHQLQEQGISNQFFKIKGETRNCIAVLHEGMQTKILEAGPYSDVDEAEVSLSHMSTIAKPFDVLTSQAVCLGD

SEQ ID NO: 259 - DNA, 348 bp, Streptococcus pyogenes
atgagtttaacagttatcttaaatccttctgtcgctatttcctatcctttagattgtctggctatggacacggttaattgtgttgacagaacggcaaaaacagctggtgataaggagctaaatgtgaccagaatgttagcaaaagctggtcagttatggcaacaggatttagtggtggtaagctgggtgactttatcattcatcagttacaagaacagggcatttctaaccaatttttcaaaatcaaaggggaaacgagaaattgtattgctgttttacatgaaggcatgcagacaaaaattttggaagctggtccctacagtgatgtggacgaagccgaagtctctt

SEQ ID NO: 260 - protein, 116 aa, Streptococcus pyogenes
MSLTVILNPSVAISYPLDCLAMDTVNCVDRTAKTAGDKELNVTRMLAKAGQLWQQDLVVVSWVTLSFISYKNRAFLTNFSKSKGKREIVLLFYMKACRQKFWKLVPTVMWTKPKSL

SEQ ID NO: 261 - DNA, 207 bp, Streptococcus pyogenes
ttggccgtctctttagcccgttcggttaagcctgagttgaaacttggtatttgtggggaacatggtggcgatcctgcttccattgccttttgccacagccaaggcctgacctacgtttcttgttcgccatttagagtgccgcttactcgcttggcggctgctcaggctgccatcaaagcttcaggccacagtcttacccaagacaaa

SEQ ID NO: 262 - protein, 69 aa, Streptococcus pyogenes
MAVSLARSVKPELKLGICGEHGGDPASIAFCHSQGLTYVSCSPFRVPLTRLAAAQAAIKASGHSLTQDK

SEQ ID NO: 263 - DNA, 114 bp, Streptococcus pyogenes
gtgatgtttgtaggaaaatacttggaagaatacgttgacaggggtatttttgataaggagccgttccagacctttgatcagaaagggattggccgtctctttagcccgttcggt

SEQ ID NO: 264 - protein, 38 aa, Streptococcus pyogenes
MMFVGKYLEEYVDRGIFDKEPFQTFDQKGIGRLFSPFG

SEQ ID NO: 265 - DNA, 102 bp, Streptococcus pyogenes
ttggagaaagaggctaagcagatgattgatttaaaaaggaatcttttcaaaattgatgtccgggcacaaaaggatgaagagaaagttttcatgcgtacggcg

SEQ ID NO: 266 - protein, 34 aa, Streptococcus pyogenes
MEKEAKQMIDLKRNLFKIDVRAQKDEEKVFMRTA

SEQ ID NO: 267 - DNA, 462 bp, Streptococcus pyogenes
gtgatgtataacattttgctaggaagagaatctgttacagaaaaacaagttattgaaatctgtaaaagggtattactatatgaggatatcaggagtatgccaatgaagtttcataccccactttttcgagacaatccatcactatctggggggcaaaaacaacgaatttctctagcaagagagttagtaactacccctagaatcttagttcttgatgaacctacatcagctttagatgtaaaaactgaaagaataatccaaaaaaatgttgaggctttacattgtacgagggttttggttacccatagacttaatacagttgaaaaagctgataagattttaataatggataatggcaaaattattgactatggaaaccatcattatttgtacaaaaataataaggattattgtgacttatatgactcgtatatgaataaatatcaggaggaagaggtaaaa

SEQ ID NO: 268 - protein, 154 aa, Streptococcus pyogenes
MMYNILLGRESVTEKQVIEICKRVLLYEDIRSMPMKFHTPLFRDNPSLSGGQKQRISLARELVTTPRILVLDEPTSALDVKTERIIQKNVEALHCTRVLVTHRLNTVEKADKILIMDNGKIIDYGNHHYLYKNNKDYCDLYDSYMNKYQEEEVK

SEQ ID NO: 269 - DNA, 180 bp, Streptococcus pyogenes
ttggaggagttcaccaagccaactcataaaacttatagcgagatattcgagaaatggtatcaagcctatcaagatacggtagagccaaccacggcttctcgtactcttgatctgtttcgacttcacattctgccagtcatgggagaattgcccattaacaaaacctcccctttagactgc

SEQ ID NO: 270 - protein, 60 aa, Streptococcus pyogenes
MEEFTKPTHKTYSEIFEKWYQAYQDTVEPTTASRTLDLFRLHILPVMGELPINKTSPLDC

SEQ ID NO: 271 - DNA, 147 bp, Streptococcus pyogenes
atgattgagattggagttgacccagtaaatacagccaaaaggttaggacatgctagtagtcaaatgactcttgatacatacagtcatgctactgcagtcggagaagacaaatcaatcaaacaatttgctaactgtctcaaaaataac

SEQ ID NO: 272 - protein, 49 aa, Streptococcus pyogenes
MIEIGVDPVNTAKRLGHASSQMTLDTYSHATAVGEDKSIKQFANCLKNN

SEQ ID NO: 273 - DNA, 294 bp, Streptococcus pyogenes; identical to SEQ ID NO: 247

SEQ ID NO: 274 - protein, 98 aa, Streptococcus pyogenes; identical to SEQ ID NO: 248

SEQ ID NO: 275 - DNA, 117 bp, Streptococcus pyogenes
atgagaaagtatttacaggtgattggggcttcaattgcctttgtaggtgtggctttatgcattgatcatatgcatgatggggttattacccgtgttgaaatgataaaatccttaaaa

SEQ ID NO: 276 - protein, 39 aa, Streptococcus pyogenes
MRKYLQVIGASIAFVGVALCIDHMHDGVITRVEMIKSLK

SEQ ID NO: 277 - DNA, 162 bp, Streptococcus pyogenes
atgttatttgggacactcctaattgctatcagtatttatcctataatgtcttggttaggttggtggggatatggtccggttgctatcttatggttgataatcatgcgtatcgccttaagaattgagcgatttaaaaagacatatgatgttcagacttaccga

SEQ ID NO: 278 - protein, 54 aa, Streptococcus pyogenes
MLFGTLLIAISIYPIMSWLGWWGYGPVAILWLIIMRIALRIERFKKTYDVQTYR

SEQ ID NO: 279 - DNA, 102 bp, Streptococcus pyogenes; identical to SEQ ID NO: 265

SEQ ID NO: 280 - protein, 34 aa, Streptococcus pyogenes; identical to SEQ ID NO: 266

SEQ ID NO: 281 - DNA, 144 bp, Streptococcus pyogenes
ttgagaaaacaagagcaagaccatcacaaacaggacgtaaaccaaaagaaacctgaagaaatgactaaattagagcggcttcaagaagaaaatgaatatctcagaactgaggttgcttacttaaaaaaaccgaggaactccgtt

SEQ ID NO: 282 - protein, 48 aa, Streptococcus pyogenes
MRKQEQDHHKQDVNQKKPEEMTKLERLQEENEYLRTEVAYLKKPRNSV

SEQ ID NO: 283 - DNA, 132 bp, Streptococcus pyogenes
gtggtttttccaaatgaagaagccttagaacgatgtcttgtaagtattttcgaggactataatattaagttcggagctcgtattcataaaggattcggagcatgctttgacacacttgatagtttatttgac

SEQ ID NO: 284 - protein, 44 aa, Streptococcus pyogenes
MVFPNEEALERCLVSIFEDYNIKFGARIHKGFGACFDTLDSLFD

SEQ ID NO: 285 - DNA, 147 bp, Streptococcus pyogenes
atgacatcacttgaaacaacggaaaatctcctaactttctatcaatttccacattacatttggtctagtatttactctacaaacttgattgaatcactcaataaagaaatcaagcgacaaagcaagaaggagggtggtttttccaaa

SEQ ID NO: 286 - protein, 49 aa, Streptococcus pyogenes
MTSLETTENLLTFYQFPHYIWSSIYSTNLIESLNKEIKRQSKKEGGFSK

SEQ ID NO: 287 - DNA, 147 bp, Streptococcus pyogenes
atggttaacagtgatattacagttacctatactcttaaagacaatttggtagcccttcataaggaatataaaacctttgtcaaaaaaatattacagataaaccgatcaccagtgactacgacaaggctaaggttatttataaccatt

SEQ ID NO: 288 - protein, 49 aa, Streptococcus pyogenes
MVNSDITVTYTLKDNLVALHKEYKTFVKKILQINRSPVTTTRLRLFITI

SEQ ID NO: 289 - DNA, 144 bp, Streptococcus pyogenes
atggagcaatttgcaaaagatatcactttgaaacgcttgtctgaaccagaagatattgctaatgcagtaggcttcttagcgggagatgattcaaattatatcactggacaaacaatagttgtcgatggtggtatggtattccat

SEQ ID NO: 290 - protein, 48 aa, Streptococcus pyogenes
MEQFAKDITLKRLSEPEDIANAVGFLAGDDSNYITGQTIVVDGGMVFH

SEQ ID NO: 291 - DNA, 174 bp, Streptococcus pyogenes
atgattaagccctatgggtttaagtatgggttagttggagaggttttgcggcggattgaacgcctagggtttacgtttgagcgattagagctaagacaagctagttcgaaatacttggctaagcatgatgaggccttggtgataaacctttttatcctggacttaaaacttacc

SEQ ID NO: 292 - protein, 58 aa, Streptococcus pyogenes
MIKPYGFKYGLVGEVLRRIERLGFTFERLELRQASSKYLAKHDEALVINLFILDLKLT

SEQ ID NO: 293 - DNA, 102 bp, Streptococcus pyogenes
atggtcatgatgagtattgatctgtgtgactatgtgacggttgaccatatagatgacaataagattgtctttgcctcaaactgtccgaaaatacctattaac

SEQ ID NO: 294 - protein, 34 aa, Streptococcus pyogenes
MVMMSIDLCDYVTVDHIDDNKIVFASNCPKIPIN

SEQ ID NO: 295 - DNA, 135 bp, Streptococcus pyogenes
atgaaacatcgatttcaagttaaaagaggagtttccgtttacttggaaaagcggattcccatgtgtgctggtatgggaggaggttctagcgatgctgttactatcagagcattaaatcagatggctccttactct

SEQ ID NO: 296 - protein, 45 aa, Streptococcus pyogenes
MKHRFQVKRGVSVYLEKRIPMCAGMGGGSSDAVTIRALNQMAPYS

SEQ ID NO: 297 - DNA, 225 bp, Streptococcus pyogenes
gtgtctactactcatttggttgcggcgattgaagcgggtaactataatgatgggatattgactgaaatgaacaatttgctggaagatattttcattgccaagcgaccctttattcaaaaaataaaagagaaaacactgcaagctggtgctgctaatgctttgatgacaggaagtggaccgactgtttttgctttgtgccaaaccgaaaaacaaactataatagtt

SEQ ID NO: 298 - protein, 75 aa, Streptococcus pyogenes
MSTTHLVAAIEAGNYNDGILTEMNNLLEDIFIAKRPFIQKIKEKTLQAGAANALMTGSGPTVFALCQTEKQTIIV

SEQ ID NO: 299 - DNA, 885 bp, Streptococcus pyogenes
atgttacaccttcatctagaaaccaaattacaagataaattatcactgctcaacattttgttagacgtttccgaagtctccatagaccagttgtgtcaggaaaccgaactcaaaaaacaacgtgtctacaacttactctttgaaatgattaaggatttagaagacaccctcaccttaaccatttgtgacgacactgtttctatcccctataagacctaccaacttaaaatgccttattttaagaaactctatcaaacctcgatattcttaaagatgttatgttttttaattgaaccaggagagctgagcctacacgacttcattaaacgagagtatatttcccaagccaccgcttaccgtatcaggaccaattgtcggaaatacttgaaaaaggtaggtttaaacgttcggcaaaaccatgttgttggaccagaataccgtatccgctttctgatcgccttgttgcactatcagtttggtatgaccatttatgattttgataaaacatcaatgaataaagtggtttcgctgattataaactccaatcaagccaccacacttaatgatgccagtaaagccccttatgaattttcatactttgccattttgatatcccttatatggaaacggcgacatgataacttggggatccctcagacagatgcattcaaacacttgaaaaaactgtctatctatcgagatatcaaaatgaccagtcaggaaatcatcggaaaatggtaccatcctgagttaactgatgaggatttggattatatttttttatgtttttgcaccaccaataatcctttccataaggataaatggacacctaaaaaagtgaaagaattgtttgagttggtgatgacaaaacaaatggaaaaacct

SEQ ID NO: 300 - protein, 295 aa, Streptococcus pyogenes
MLHLHLETKLQDKLSLLNILLDVSEVSIDQLCQETELKKQRVYNLLFEMIKDLEDTLTLTICDDTVSIPYKTYQLKMPYFKKLYQTSIFLKMLCFLIEPGELSLHDFIKREYISQATAYRIRTNCRKYLKKVGLNVRQNHVVGPEYRIRFLIALLHYQFGMTIYDFDKTSMNKVVSLIINSNQATTLNDASKAPYEFSYFAILISLIWKRRHDNLGIPQTDAFKHLKKLSIYRDIKMTSQEIIGKWYHPELTDEDLDYIFLCFCTTNNPFHKDKWTPKKVKELFELVMTKQMEKP

SEQ ID NO: 301 - DNA, 709 bp, Streptococcus pyogenes
gactacgatgattgattttattatttctattgatgattgcgcagttgaattggatagtcgtcaatcttggaaaattcgctcccccttatcaaccattctatttcttgtcttcgtttgtcagttagctggcattgaaacctggaaggagatggaagattttattgaaatgaatgaaccattgtttgcgacctacgttgatttgagtgaaggttgctcgtctcatgataccttagagcgtgtgattagtcttgttaattcagaccgtttaaaagagcttaaagttcaatttgagcaatcattgacaagcttagatgccgttcatcaactgatttcagtggacggtaaaacgattcgaggcaatcgaggtaaaaatcagaagcctgttcatattgtaacggcttatgatgggggtcatcatcttagtttgggacaggtagcggttgaggagaaaagtaatgaaattgttgccatccctcagctattgcggacaattgatatccgtaaaagcattgtaacgatagacgcaatgggcacgcagacggctatcgttgatacgattataaaaggtaaagcagactattgcttagccgtcaaaggaaatcaagaaacactttatgatgatattgctctttattttagtgatgtcaacttattggaagaactccaagaaaatgcgcagtattatcagactgttgaaaaatctagaagt

SEQ ID NO: 302 - protein, 237 aa, Streptococcus pyogenes
MTTMIDFIISIDDCAVELDSRQSWKIRSPLSTILFLVFVCQLAGIETWKEMEDFIEMNEPLFATYVDLSEGCSSHDTLERVISLVNSDRLKELKVQFEQSLTSLDAVHQLISVDGKTIRGNRGKNQKPVHIVTAYDGGHHLSLGQVAVEEKSNEIVAIPQLLRTIDIRKSIVTIDAMGTQTAIVDTIIKGKADYCLAVKGNQETLYDDIALYFSDVNLLEELQENAQYYQTVEKSRS

SEQ ID NO: 303 - DNA, 216 bp, Streptococcus pyogenes
atgtcacgtaaaagaaacagtcctgacaatggcatgatggaatctttctttggcatcttaaagtcagaaatgttctatggttatgagaataactataaatcactagaagacttagaacaagcgattacaaatgacattgattattacaacgataaacatatcaaagtaaaactaaaaggatttagttctgtacaatacagaactaaatcctttact

SEQ ID NO: 304 - protein, 72 aa, Streptococcus pyogenes
MSRKRNSPDNGMMESFFGILKSEMFYGYENNYKSLEDLEQAITNDIDYYNDKHIKVKLKGFSSVQYRTKSFT

SEQ ID NO: 305 - DNA, 229 bp, Streptococcus pyogenes
gaacactacaactctcaacaccatcacggagttgggacggtttcgtctaagcagaatccacgaccactttgatttaatccagtatctagaagcacatcacctcaatatcaataccgagctaaccttaactcaaattgatacctttgcaaaaacctatacgatttgttatggcgacaaggaacttgtcatccctgaaaatattgctaagcaactttatgtcacagccctt

SEQ ID NO: 306 - protein, 77 aa, Streptococcus pyogenes
MNTTTLNTITELGRFRLSRIHDHFDLIQYLEAHHLNINTELTLTQIDTFAKTYTICYGDKELVIPENIAKQLYVTAL

SEQ ID NO: 307 - DNA, 1351 bp, Streptococcus pyogenes
gttattgttacagggtacttgctttatgagcttgtttaagctactaaaggtgtgtgccactatacttccttccaaatttctgagaatttttgttataatagtaactatgaaagatataatgataaaaaggtgggttatccttttttttatggtattaacttgttcagggtttggtaaaacagttctcgcagctgattttcaagtgggagcagaacatgcgattgtcgtagaggcagactctgggagagttctgtatgagaaagacgctaagacgccagatgctattgcctctttgaccaaattggtgacggcttatctggttttagataaggttaaatcaggccagctgcaattatcagatcaagttaatctctcagattatgccttcgagttaacaaaagataggtctttaagtaatgtaccttttgacaaaaaaacttattcagttcaagacctgttgacagctactttggtagcaagctcaaatagcgctgctattgcgttagccgaaaaagtggcgggctcagagcttcattttgtaaatcaaatgagagaacagctatctcattgggggattacttctggtaaaatcctcaacgcttcaggactgccgaatgaggtgctaaaggaccatcgttatcctggttctgcgttggaagaagagaatatgttgagtgctcaggatgttgccattgtgacgatgcatttactggaagattttcctgagattttagagatcactaaacaaacagaagttgattttgctggtaattctattaaaagttttaatcaactcttaccaggtatggctaagggtagagcaggagtggatgggctaaagacaggaacgacagatttggcaggtcattgccttgtggtaacttctattgaaaatggtatgaggctgattaccgttattctaaatgctgatggatctgataaaaaccaaaacacgcggtttgagcaagcaaatcgcttgttggactatgtggctagaacttattgtcgtcgtaagattcttaaaaaaggaagtcttgtctcggagcgatcgctccctattcaagatggccaagtaaaagaactaccgatatctgttgccgaagatgtaaccatcattttgcaacagggtgaacaagttcccaaacctaaacaatttatgatatcagagacttctttattagcaccgattactaaaggtgaagtggttgcttatttgacgtctccaagaataacagatcagtcagtgaggtatttaaaggaacctaagcgtattcctcttaaagctagccaatctctaaaaaaagcctctgacttacagctgtggtggcgagattttcttgaaaaaagacgt

SEQ ID NO: 308 - protein, 451 aa, Streptococcus pyogenes
MLLLQGTCFMSLFKLLKVCATILPSKFLRIFVIIVTMKDIMIKRWVILFFMVLTCSGFGKTVLAADFQVGAEHAIVVEADSGRVLYEKDAKTPDAIASLTKLVTAYLVLDKVKSGQLQLSDQVNLSDYAFELTKDRSLSNVPFDKKTYSVQDLLTATLVASSNSAAIALAEKVAGSELHFVNQMREQLSHWGITSGKILNASGLPNEVLKDHRYPGSALEEENMLSAQDVAIVTMHLLEDFPEILEITKQTEVDFAGNSIKSFNQLLPGMAKGRAGVDGLKTGTTDLAGHCLVVTSIENGMRLITVILNADGSDKNQNTRFEQANRLLDYVARTYCRRKILKKGSLVSERSLPIQDGQVKELPISVAEDVTIILQQGEQVPKPKQFMISETSLLAPITKGEVVAYLTSPRITDQSVRYLKEPKRIPLKASQSLKKASDLQLWWRDFLEKRR

SEQ ID NO: 309 - DNA, 1713 bp, Streptococcus pyogenes
atggaggtagaaatgaatgttgccggaatgctccatattcctgattcgaggtattgctttgccatatctcaaaaggaacttgtcatccgattacgcgtggccaaagaagatagaggtattactgttaatttggtccacgggcctaaatatggttatcatgaattccaagaagaattggaaatgtcagttgcctatacagaccatacgcatgcttattatgaaactactttaacattagacgatgtgaggttggcctacatttttaaaattgaagaagaaggtcaaacctattattttagtgaagatgggttaactactagttacgatttttcaaatgggttttataatttcttccaaatgccttatatcaatgctgttgatgttcatcaagtcattccttggacaaaagacgcggttttttatcaaatctttgttgatcgctttaaccgtggggattgggaaaaaggtgacagttatgtcaacatgggttggttagaaaaaccgactcctaaaagttttgctggtggagatttaaagggaattacagaaaaattagattacctcaaagatttagggattactgtcatctatttaacgccaatttttcaatccattagtaatcacaaatatgatattagtgattactacgctattgatccacaatttggaactaaatatgatttgcaagaattgattgatttagctcacaaaatgggaatcaagattattctagacgctgtctttaaccatgccagcagtgatgccgtggaatttcaggatgtcttgagatacggtaaagagtctaagttttttgattggtttatgactcatgatgaacacccatccatggacctagtaaactatgaaacctttgctggatgtaactatatgcccaaatggaatacctcaaatagagacgtgcaagactatctgattgagattgggcgatactggattaaagaattttgtatcgatggttggcgcctagatgtttctgatgaagtatctcatgatttttggcgacgtttccgtcaggcggttaaagcggaaaaagcagatgccattttaattggggagaactggcatgatgcctatccttatttggcaggggatcagtatgatgggataatgaattatgctttcaccaaagcctgtttggattactttgcttttgaaaccatgacatcaaaacaattggctgagaaattaagcaacattttgatgcgaaacacttggcaagtcaatcgcatgaacttgaatcttttggattctcatgatacgcatcgtttcttcactcaagttaagggttccaaagataaattgttagctgctttagcattgctctttatctttatgggcattccttgcttgtattatgggacagaagtggcaatggaagggggttacgaccctgattcgcgtcgcggttttccttgggatgatgctgagcgggacaaggatttctttagcaaagtaaaagcgattattgctcttcgccaacagccagctcttcaagaaggagctattagcattgattatgacgaagactgcctcattctgaaacgcagcttaggtgagcaaagcatttcacttgttcttaacaatggtgagagtgcttattctattaaggaaggaggacagattttgacaagcaatggggtaactaaaaacaaaaaacaattactccaggatggatatattgtgtttagtaac

SEQ ID NO: 310 - protein, 571 aa, Streptococcus pyogenes
MEVEMNVAGMLHIPDSRYCFAISQKELVIRLRVAKEDRGITVNLVHGPKYGYHEFQEELEMSVAYTDHTHAYYETTLTLDDVRLAYIFKIEEEGQTYYFSEDGLTTSYDFSNGFYNFFQMPYINAVDVHQVIPWTKDAVFYQIFVDRFNRGDWEKGDSYVNMGWLEKPTPKSFAGGDLKGITEKLDYLKDLGITVIYLTPIFQSISNHKYDISDYYAIDPQFGTKYDLQELIDLAHKMGIKIILDAVFNHASSDAVEFQDVLRYGKESKFFDWFMTHDEHPSMDLVNYETFAGCNYMPKWNTSNRDVQDYLIEIGRYWIKEFCIDGWRLDVSDEVSHDFWRRFRQAVKAEKADAILIGENWHDAYPYLAGDQYDGIMNYAFTKACLDYFAFETMTSKQLAEKLSNILMRNTWQVNRMNLNLLDSHDTHRFFTQVKGSKDKLLAALALLFIFMGIPCLYYGTEVAMEGGYDPDSRRGFPWDDAERDKDFFSKVKAIIALRQQPALQEGAISIDYDEDCLILKRSLGEQSISLVLNNGESAYSIKEGGQILTSNGVTKNKKQLLQDGYIVFSN

SEQ ID NO: 311 - DNA, 1293 bp, Streptococcus pyogenes
gtgtttaagaaaaaaccatttcgggaggaacatgttatgtcatggaattggaaaaaaacatctgtgcttggaactttatccttagcttcagtgctacccctaactgcttgcgtaagtggtggtggtaaaggcgttaaggaaacagacggaaagactattgtagtctctgttgatgagggatatgttgattacattaagagtattaagggtgagtttgaaaaagaacataaagtcaccgttaaagtcaaaaaagaaggtatgatggatactcttgataagctatcaacggatggtccaacaggagcttcaccagatgtctttttagcaccttttgaccgtgtaggtggtttaggaactgaaggtcaaatcgctgaggttactttaggaaacagcaaagagtttgatgatacggttaagaaattagtaaccattgatggtaaaacttatggtgcaccagacgtaattgaaactttggtaacttattataataaggatttagtgcctcaagcacctaaaagctttactgaattagaagtcttacaaaaagattctaagtttgcttttgcctctgaaccaggaaaatctgtaggtttcttggcgaaatggacagacttctattatggttatggtttaattgccggttatggcggttatatctttggtgataaaggaaccaaaccaagtgatttaggcctaggtaacgacggaactgttgaagggttaaactacgcgaaacagtggtatggcacttggcctcaaggaatgcaagacactaaaaaagctggtgattttatcactgaacaatttatttctaaaaaagctggtgtcattattgatggtccatgggcagctagctcctttaaagatgctggtgttaactttggggtaatggaaattcctactttgacaaatggtaaaaaataccaaccgttcgcaggtggtaaagcttgggttatttcaaactattctaaaggaaaaacgactgctcaaaaattccttgattatgtgaccaatgctgaaaaccaaaaacgtttctatgataaaacacaagaaattccagctaacttaacagcacgtaactatgcttctaaagagggtaatgagttaacgaaagctgtgattagtcagtttgagagcgcacaaccaatgccaaatattccagaaatggctgaagtttgggaaccaggtgcaaatatgttctttaacgtggcttctggtaaggaagaagcatctaaagctgcaaaagaagcagcaaaaactattaaggaagctattgaacaaaaatacgctgaa

SEQ ID NO: 312 - protein, 431 aa, Streptococcus pyogenes
MFKKKPFREEHVMSWNWKKTSVLGTLSLASVLPLTACVSGGGKGVKETDGKTIVVSVDEGYVDYIKSIKGEFEKEHKVTVKVKKEGMMDTLDKLSTDGPTGASPDVFLAPFDRVGGLGTEGQIAEVTLGNSKEFDDTVKKLVTIDGKTYGAPDVIETLVTYYNKDLVPQAPKSFTELEVLQKDSKFAFASEPGKSVGFLAKWTDFYYGYGLIAGYGGYIFGDKGTKPSDLGLGNDGTVEGLNYAKQWYGTWPQGMQDTKKAGDFITEQFISKKAGVIIDGPWAASSFKDAGVNFGVMEIPTLTNGKKYQPFAGGKAWVISNYSKGKTTAQKFLDYVTNAENQKRFYDKTQEIPANLTARNYASKEGNELTKAVISQFESAQPMPNIPEMAEVWEPGANMFFNVASGKEEASKAAKEAAKTIKEAIEQKYAE

SEQ ID NO: 313 - DNA, 1422 bp, Streptococcus pyogenes
gtgagcaaagaaaggacaaaggatatgaaacaaagaaaacaccgttatcaatttccagatggctttttatggggaagttccacatctgggcctcaaagcgaaggaacggttcctggagatggcaaaggacctagcaactgggattactggtttagtattgagtcagctaagtttcatcaccaaattggtccagaaaaaacctcaaccttttatgaaaactataagggtgacattgcccttttgaaagaaacaggccacacgatttttcggacctcaatccagtggtctcgattgattccagaaggagtcggggaggttaatccaaaggcggtgacattttaccgagaagtatttcaagacattattgctcaaggtattaaattgattgttaacctctatcattttgacctcccctatgccttgcaagaaaaaggtggctgggaaaacaaagctactgtctgggcttatgaaacctacgcaaaaacctgttttgagctttttggtgatttagtaaacacttggattacctttaatgaaccgattgttccagtcgaatgtggctatttaggttattatcactacccttgtaaagtagatgccaaggcagcagttcaagtggcttacaacacacaactggccagttcactggcggtcaaagcttgtcataagcttcatcccgaccacaagattagtattgtgcttaacatgacacctgcttatcctcggagtaatgctcctgaagatgtcaaggctgctagaatcgcagagcttttccaaaccaaatccttcctagatccatcagttttgggtgtttacccagcagagttagtttccattttagaggaagctgatttattacctcaatatagtgctgatgaattagagattatcaaaaacaatactgttgattttttgggagttaattattatcagcctttgcgggttcaggcacctagtaagtcacagcaagagggggacctccttatcttagatatttattttgaaccttatgatatgcctggtaaaaaagtcaatcctcaccggggttgggaaatttatgaaccaggactttatgatattgcccttaatttaaaagaacactatggtaacatcgaatggctagtcacggaaaatggtatgggtgtcgaaggtgaagaagcttttttagcagatggccagatacaagatgactaccgcatcacctttatcgaggatcatcttatccagcttcataaggctttgggagaaggagccaactgcaaaggctacctcttgtggacttttattgattgctggtcttggttaaatgcttataaaaaccgatatggtttggtagctttggatttagagagtcaaaagcgaaccataaaaaaatcaggttactggtttaaggcgttgagcgagtcaaatggttttgataaa

SEQ ID NO: 314 - protein, 474 aa, Streptococcus pyogenes
MSKERTKDMKQRKHRYQFPDGFLWGSSTSGPQSEGTVPGDGKGPSNWDYWFSIESAKFHHQIGPEKTSTFYENYKGDIALLKETGHTIFRTSIQWSRLIPEGVGEVNPKAVTFYREVFQDIIAQGIKLIVNLYHFDLPYALQEKGGWENKATVWAYETYAKTCFELFGDLVNTWITFNEPIVPVECGYLGYYHYPCKVDAKAAVQVAYNTQLASSLAVKACHKLHPDHKISIVLNMTPAYPRSNAPEDVKAARIAELFQTKSFLDPSVLGVYPAELVSILEEADLLPQYSADELEIIKNNTVDFLGVNYYQPLRVQAPSKSQQEGDLLILDIYFEPYDMPGKKVNPHRGWEIYEPGLYDIALNLKEHYGNIEWLVTENGMGVEGEEAFLADGQIQDDYRITFIEDHLIQLHKALGEGANCKGYLLWTFIDCWSWLNAYKNRYGLVALDLESQKRTIKKSGYWFKALSESNGFDK

SEQ ID NO: 315 - DNA, 531 bp, Streptococcus pyogenes
ttggggtgctatttttttatgaaatttaatcaagaaacgaaagttaagatttatgagttacggcaaatgggagagtccattaaatccatatcaaaaaagtttgatatggcagaatccgatctcaaatatatgattcgcttgattgataggtatggggtaaccattgttcaaaaatgtaagaatcattattattctccagaactgaagcaagagataataaataaagtcctgattgacggccaatctcagaaacaaacatccttagattatgctttaccaacttctagtatgctctcaaggtggatagcgcaatacaagaaaaacggttatactattcttgaaaaaccaagagggagaccgagtaagatggggcgtaaacgtaagaaaaatttggaagagatgacagaggttgaacgtcttcagaaggaattagaataccctagagcggagaatgctgtgctaaaaaagctgagagaataccgcttgagggacgaagcaaaactcaaagagcaacagaaatcattcaagcat

SEQ ID NO: 316 - protein, 177 aa, Streptococcus pyogenes
MGCYFFMKFNQETKVKIYELRQMGESIKSISKKFDMAESDLKYMIRLIDRYGVTIVQKCKNHYYSPELKQEIINKVLIDGQSQKQTSLDYALPTSSMLSRWIAQYKKNGYTILEKPRGRPSKMGRKRKKNLEEMTEVERLQKELEYPRAENAVLKKLREYRLRDEAKLKEQQKSFKH

SEQ ID NO: 317 - DNA, 996 bp, Streptococcus pyogenes
ttgatatactgtaactataacgtgattaacacaaagggaggttgggaaatgataagacaaaccaacaaaaagacatccttttggaaaaatgtgattaaataccgggccttattattaatggtattaccaggtttcatctggttcatctttttcttttatattccagttttagccaatgtggttgcttttaaagattttcattattcagcagggggctttatggaaagtttgaaggagagcccttgggttggtttggctaacttcaaatacctctttgcttccaaagatgcttggttgattaccagaaataccattgcttacaatgtgattttcttactctttaatgttttctttgcgattgcttttgccattatcatgagtgagttacgaaataagagaacggttaaggtctatcacaccatgtccttattgccttatttcttatcatgggtggttattgaatactttgtttctgcctttttaaatacggataaaggtttcattaatcagctcttgaccggaagtggagcagatccaatcaagtggtattccaatcccacttggtggcccttgattttacttttcatgagtgtctggaaggggctaggctacaatagcattatctactatgcttcagtcaaagggatttctgatacttattatgaagctgctatggtggatggtgcaagcaaatggcaacaaattaggaacatcaccattccacaattattgccaatgatgtctatcttattgatcattaatattggtaatatttttaaatctgatttcggacttttctacgttattcctaagaattcaggcccactttatgacgtgaccagtgtgttaaatacctatgtctacaatgccttgactgctacaggagatattgggatggcatcggcagctagcctttatcagtcagtagttgggaccagcatcttgttagtcaccaatgcgattgttcgtcgcatggaccctgatgcagccttgttt

SEQ ID NO: 318 - protein, 332 aa, Streptococcus pyogenes
MIYCNYNVINTKGGWEMIRQTNKKTSFWKNVIKYRALLLMVLPGFIWFIFFFYIPVLANVVAFKDFHYSAGGFMESLKESPWVGLANFKYLFASKDAWLITRNTIAYNVIFLLFNVFFAIAFAIIMSELRNKRTVKVYHTMSLLPYFLSWVVIEYFVSAFLNTDKGFINQLLTGSGADPIKWYSNPTWWPLILLFMSVWKGLGYNSIIYYASVKGISDTYYEAAMVDGASKWQQIRNITIPQLLPMMSILLIINIGNIFKSDFGLFYVIPKNSGPLYDVTSVLNTYVYNALTATGDIGMASAASLYQSVVGTSILLVTNAIVRRMDPDAALF

SEQ ID NO: 319 - DNA, 558 bp, Streptococcus pyogenes
gtgatgactgataaagcactctcaaaaagatcacttcaaaacttaacacaatttaataaagaaacacgacgcatagcacgtgaatctatggaaatcgccttactaaatcttctagaaacaaaacctttaggtgatattacgatttcagaattggtgacgaaagcaggagtatctcgtaacgctttttatcgtaattatacctctaaagaagccattatagaacaactgttagtaggggttatccgtcgtatttttcgtggactaaaacaatttgatattaaaactcaggcttatcaagcttggctctatctttttactgaagctaaaaaagaagctcagcttcttaaaatgattttcaaacatcacctgcaccatcttctaacacgattagtcactaaacgtctgaaagcttatcaaaaattaaaagacaaaaaacaatcgcactataagcgccttttttggagcaatgctattgtttctgtcttgacaaactggatttcagatgacatgatcgttcctgccgaagaaatggctgctatgggcttgcctctattaacg

SEQ ID NO: 320 - protein, 186 aa, Streptococcus pyogenes
MMTDKALSKRSLQNLTQFNKETRRIARESMEIALLNLLETKPLGDITISELVTKAGVSRNAFYRNYTSKEAIIEQLLVGVIRRIFRGLKQFDIKTQAYQAWLYLFTEAKKEAQLLKMIFKHHLHHLLTRLVTKRLKAYQKLKDKKQSHYKRLFWSNAIVSVLTNWISDDMIVPAEEMAAMGLPLLT

SEQ ID NO: 321 - DNA, 1701 bp, Streptococcus pyogenes
ttgatactcaagcaagactggaggcaagtatttatggctaaacctaacagatctaccttaagcctggtttggcgtttattaaccctaatgaaaactctgctaccttggattatcttggctgttggctttgctgttatgggttttgtcatcacggtaagtattccaactggaatagcttatttaggactactagctattagacaagaagtgattccaatattagctttatatcttttgattgctctagcctttttaagaggttttgttcgttatggagagcattattttggtcattttgttgcttttcatagtttagcagcttttaggaacttgatctttaagaaactaagagctctttctccagcttgcttggatagtcaagacagtggttatttgcttaaaatgattggagaagatattgaggcattagaagttttttttgcccacacaatcgcacctatttgtacagcaatattgtctgcaggtttaatgttctggtacttttgtcaaagtagttggcagttagccttattagctttggcaacctatgcttgtttagccattgttatacccatttattttgctaatattttacaggttttactaaaaagccaaaatgaaggtcgaaaagattacctgtcttattttttagagagtttacgatcagtcaaagatcttttgcaatttcaggtattagacgagcaatttgaacgattaataaaaaaaagtaatcatgtaaatgctcttgatcgtaacgtagcgcaagcccaatttttgcaaatggcattgacttttttctggcttggcttaatgatcttagcattttcttatatggtttttgatgggatatgccatgacagcttatcatttgataaaggcttattaacttttattgctttcactgcttcgttttctccttttttagaactaggacgtttgccattaggttttaagcgtgctatgaatgcggctcgaaatatttttgaccttctagacgaaaatgtcatagtagatgaaggcacaaaacaaatagatcgtttaaggagtgtttcttttgaggacctcagttttgcttatccaaagcgccaagagctggtttttaaggatttaacagttacctttcaagaaaaggggattattggcattaaaggcgaatcaggatctggtaaatcaactttggtgaaattaattatgaaatggtataattggaagacaggagatatttttcttaatgataggaatagttgcttactaaatgctgctaaattacaagatactattgcttatgtgccacaaacagcgcagcttttccaacagtctatccgtgaaaatcttatctttggccgtcaagatatttcagatgagtccatttggaatttagctgaggcttgtggtatgaaagacagactgttagcttgtaaggaaggtttggatacgattatcaagagtccttctgacttttcagctggagaaggtcaacgtttagagttgatgcgagctttattgaaagatgcgagttgctatatttttgatgaacccacgtcaaatttagattctctaaatgaagctatcttgcttgatttaattaaaacacattgtcaaggattggtcttcttaatttctcacaggccatcaaccctagcttgtgttgatcatctattttgcgtaaaaaatggttccctaaaagaggtgaataaaaaa

SEQ ID NO: 322 - protein, 567 aa, Streptococcus pyogenes
MILKQDWRQVFMAKPNRSTLSLVWRLLTLMKTLLPWIILAVGFAVMGFVITVSIPTGIAYLGLLAIRQEVIPILALYLLIALAFLRGFVRYGEHYFGHFVAFHSLAAFRNLIFKKLRALSPACLDSQDSGYLLKMIGEDIEALEVFFAHTIAPICTAILSAGLMFWYFCQSSWQLALLALATYACLAIVIPIYFANILQVLLKSQNEGRKDYLSYFLESLRSVKDLLQFQVLDEQFERLIKKSNHVNALDRNVAQAQFLQMALTFFWLGLMILAFSYMVFDGICHDSLSFDKGLLTFIAFTASFSPFLELGRLPLGFKRAMNAARNIFDLLDENVIVDEGTKQIDRLRSVSFEDLSFAYPKRQELVFKDLTVTFQEKGIIGIKGESGSGKSTLVKLIMKWYNWKTGDIFLNDRNSCLLNAAKLQDTIAYVPQTAQLFQQSIRENLIFGRQDISDESIWNLAEACGMKDRLLACKEGLDTIIKSPSDFSAGEGQRLELMRALLKDASCYIFDEPTSNLDSLNEAILLDLIKTHCQGLVFLISHRPSTLACVDHLFCVKNGSLKEVNKK

SEQ ID NO: 323 - DNA, 1446 bp, Streptococcus pyogenes
ttgggaactttatttttgaaagatattcaaggagaaactgagatgactaaaacattacctaaagattttatttttggtggtgctacagctgcttaccaggctgaaggcgctacccacacagatggtaaaggaccagtagcttgggataaatacttagaagacaactattggtacacagctgagccagcaagtgatttttataatcgttaccctgtcgatttgaaacttagtgaagaatttggtgtcaacggcatccgtatctctattgcctggtctcgtatttttccaacaggaaaaggagaagttaaccctaaaggagtagaatactaccacaatctttttgcagagtgtcataagcgtcatgttgagccttttgttacacttcaccattttgataccccagaagctctccactcggatggtgacttcctcaatcgtgagaacattgaacattttgtaaattatgcagaattttgttttaaagaattctcagaagttaactattggacaacatttaacgaaattgggcctattggtgatggccaatacttagttggtaaattccctccaggtatccaatatgatcttgctaaagttttccaatcacaccataacatgatggtctctcatgctcgtgcagtcaaactctttaaagatagtggttattcaggtgaaattggtgttgtccatgcacttccaactaagtatccatttgacgctaacaatcctgatgatgttagagcagctgaacttgaagatatcatccataataaatttatccttgatgctacttatcttggtaagtattcagataaaacaatggaaggtgttaaccatatccttgaggtgaatggcggtgaacttgatcttcgcgaagaagattttgccgcactagacgccgcaaaagatttgaatgatttccttggtattaactactatatgagtgattggatgcaagcttttgatggtgagactgaaatcattcacaatggcaagggtgaaaaaggcagctctaaataccaaatcaagggtgttggtcgaagaaaagcacccgttgatgttccaaaaacggactgggactggattatcttcccacaaggcttatatgatcaaatcatgcgtgtcaaagccgattatcctaattacaagaaaatttacattacagagaatggtcttggctacaaagatgagtttgtagataatactgtctatgatggtggacgtatcgattatgtgaaaaaacacttagaagttatttctgatgctatttctgatggtgcaaatgttaaaggatactttatgtggtcactgatggatgtcttttcatggtcaaatggctatgaaaaacgttacggtctcttctatgttgattttgaaactcaagaacgttatcctaagaagagtgcctactggtataaaaaagtagcagaaactcaagtgattgaa

SEQ ID NO: 324 - protein, 482 aa, Streptococcus pyogenes
MGTLFLKDIQGETEMTKTLPKDFIFGGATAAYQAEGATHTDGKGPVAWDKYLEDNYWYTAEPASDFYNRYPVDLKLSEEFGVNGIRISIAWSRIFPTGKGEVNPKGVEYYHNLFAECHKRHVEPFVTLHHFDTPEALHSDGDFLNRENIEHFVNYAEFCFKEFSEVNYWTTFNEIGPIGDGQYLVGKFPPGIQYDLAKVFQSHHNMMVSHARAVKLFKDSGYSGEIGVVHALPTKYPFDANNPDDVRAAELEDIIHNKFILDATYLGKYSDKTMEGVNHILEVNGGELDLREEDFAALDAAKDLNDFLGINYYMSDWMQAFDGETEIIHNGKGEKGSSKYQIKGVGRRKAPVDVPKTDWDWIIFPQGLYDQIMRVKADYPNYKKIYITENGLGYKDEFVDNTVYDGGRIDYVKKHLEVISDAISDGANVKGYFMWSLMDVFSWSNGYEKRYGLFYVDFETQERYPKKSAYWYKKVAETQVIE

SEQ ID NO: 325 - DNA, 843 bp, Streptococcus pyogenes
gtgagcgaaattagaaaagaggacaagcatatgaatctacttggatcaagacgggttttttctaaaaaatgtcggctagtaaaattttcaatggtagctcttgtatcagccacaatggctgtaacaacagtcacacttgaaaatactgcactggcacgacaaacacaggtctcaaatgatgttgttctaaatgatggcgcaagcaagtacctaaacgaagcattagcttggacattcaatgacagtcccaactattacaaaaccttaggtactagtcagatcactccagcactctttcctaaagcaggagatattctctatagcaaattagatgagttaggaaggacgcgtactgctagaggtacattgacttatgccaatgttgaaggtagctacggtgttagacaatctttcggtaaaaatcaaaaccccgcaggctggactggaaaccctaatcatgtcaaatataaaattgaatggttaaatggtctatcttatgtcggagatttctggaatagaagtcatctcattgcagatagtctcggtggagatgcactcagagtcaatgccgttacagggacacgtacccaaaatgtaggaggtcgtgaccaaaaaggcggcatgcgctataccgaacaaagagctcaagaatggttagaagcaaatcgtgatggctatctttattatgaagctgctccaatctataacgcagacgagttgattccaagagctgtcgtggtatcaatgcaatcttctgataataccatcaacgagaaagtattagtttacaacacagctaatggctacaccattaactaccataacggtacacctactcagaaa

SEQ ID NO: 326 - protein, 281 aa, Streptococcus pyogenes
MSEIRKEDKHMNLLGSRRVFSKKCRLVKFSMVALVSATMAVTTVTLENTALARQTQVSNDVVLNDGASKYLNEALAWTFNDSPNYYKTLGTSQITPALFPKAGDILYSKLDELGRTRTARGTLTYANVEGSYGVRQSFGKNQNPAGWTGNPNHVKYKIEWLNGLSYVGDFWNRSHLIADSLGGDALRVNAVTGTRTQNVGGRDQKGGMRYTEQRAQEWLEANRDGYLYYEAAPIYNADELIPRAVVVSMQSSDNTINEKVLVYNTANGYTINYHNGTPTQK

SEQ ID NO: 327 - DNA, 951 bp, Streptococcus pyogenes
ttgtttcagtggctgagaatgttagaattatcggtcgttttgtggaagatgattaagaaaaacacaggaggtgtcatgtcaattgaccaacgtttacagttaaagaaattttgctttattattttaggagctgctatctacgcctttgcttttgtttatttttacatggctaatcgcattgcagccaatggtttagctggtctcaccctagttggtaaggcactttttgagattgatccttctttgataggctatttgattaatttgcctttggtcttgctgggagctagatgttttgggaaaagagccatggtttacacagtaacgggtattttatcactttacttttttgtgtggctgtttcaacgctttcctttggtcgttgacttggaccatgacaatttagtcgtttccttgatggctggaattattggtggtctaggtggcggtcttgtgtttcgcaatggtggaaccatcggtggagcagatattattgctaagttattagaagacaagttaggactacagctgaatcaagctcttttaggcattgatctttttgtcatgattgtctctttgacttatatttccctgccgcaaatgatgtatgctctgattgctagctttatgtatggtcaaattgttcgcttggtacaacaaggtggttattcagcccgtggcatttttatcgtttcagaacaagcggagaaaattgcccggttcatcatggacgaattgggaagaggagttacttatctaacaggtgaaggagcctactctggtcgccgtaaaaaagtgatttatgtggctttggggcgaagagatattagggaattaaaagcttttttaactcaggttgatcccaatgcctttatcacttattttgatgttaatgaagtcaatagcccagaatttttaactattaaaagcaaataccataaaaagagaaaa

SEQ ID NO: 328 - protein, 317 aa, Streptococcus pyogenes
MFQWLRMLELSVVLWKMIKKNTGGVMSIDQRLQLKKFCFIILGAAIYAFAFVYFYMANRIAANGLAGLTLVGKALFEIDPSLIGYLINLPLVLLGARCFGKRAMVYTVTGILSLYFFVWLFQRFPLVVDLDHDNLVVSLMAGIIGGLGGGLVFRNGGTIGGADIIAKLLEDKLGLQLNQALLGIDLFVMIVSLTYISLPQMMYALIASFMYGQIVRLVQQGGYSARGIFIVSEQAEKIARFIMDELGRGVTYLTGEGAYSGRRKKVIYVALGRRDIRELKAFLTQVDPNAFITYFDVNEVNSPEFLTIKSKYHKKRK

SEQ ID NO: 329 - DNA, 1140 bp, Streptococcus pyogenes
gtgactacgatgattgattttattatttctattgatgattgcgcagttgaattggatagtcgtcaatcttggaaaattcgctaccccttatcaaccattctatttcttgtcttcgtttgtcagttagctggcattgaaacctggaaggagatggaagattttattgaaatgaatgaaccattgtttgcgacctacgttgatttgagtgaaggttgtccgtctcatgataccttagagcgtgtgattagtcttgttaattcagaccgtttaaaagagcttaaagttcaatttgagcaatcattgacaagcttagatgccgttcatcaactgatttcagtggacggtaaaacgattcgaggcaatcgaggtaaaaatcagaagcctgttcatattgtaacggcttatgatgggggtcatcatcttagtttgggacaggtagcggttgaggagaaaagtaatgaaattgttgccatccctcagctattgcggacaattgatatccgtaaaagcattgtaacgatagacgcaatgggcacgcagacggctatcgttgatacgattataaaaggtaaagcagactattgcttagccgtcaaaggaaatcaagaaacactttatgatgatattgctctttattttagtgatgccaccttattggaagaactccaagaaaatacgcagtattatcagactgttgaaaaatctaggggacagattgaagttagagaatactgggtgtcttccgatatcaaatggttgtgtcaaaattatcccaaatggcataagttacgtggtattgggatgactcgtaacacgattgataaggatggtcagctgagtcaagagaatcgttattttatctttagctttaagccggatgtcctcacatttgccaattgtgtacgaggtcattggcagatagagagtatgcactggttattggacgttgtttatcatgaagatcatcatcagacattggataaaagagccgcatttaacctaaatcttatccgaaaaatgtgcttatattttctcaaagtgatggtatttcctaaaaaagacctcagttatcgtcgcaaacaacggtatatttctgtccatttggaagattatttagtccaattatttggagaaagaggc

SEQ ID NO: 330 - protein, 380 aa, Streptococcus pyogenes
MTTMIDFIISIDDCAVELDSRQSWKIRYPLSTILFLVFVCQLAGIETWKEMEDFIEMNEPLFATYVDLSEGCPSHDTLERVISLVNSDRLKELKVQFEQSLTSLDAVHQLISVDGKTIRGNRGKNQKPVHIVTAYDGGHHLSLGQVAVEEKSNEIVAIPQLLRTIDIRKSIVTIDAMGTQTAIVDTIIKGKADYCLAVKGNQETLYDDIALYFSDATLLEELQENTQYYQTVEKSRGQIEVREYWVSSDIKWLCQNYPKWHKLRGIGMTRNTIDKDGQLSQENRYFIFSFKPDVLTFANCVRGHWQIESMHWLLDVVYHEDHHQTLDKRAAFNLNLIRKMCLYFLKVMVFPKKDLSYRRKQRYISVHLEDYLVQLFGERG

SEQ ID NO: 331 - DNA, 240 bp, Streptococcus pyogenes
gtgaaacgtatggtcaaaaatgggtttatcaatgtgatgccttcccaagtggataagcgttataagcaagtagtgttagcgcaggttggtagagataaattgcctttgttgcgagagtgtcgtaaggatatcgagcactattttttaaaagaaattacaaaagaagagttgctgacagcgaaaaaagtaattgaacagctcaagcaaaatatgctaacttataaaggagacaacgatgct

SEQ ID NO: 332 - protein, 80 aa, Streptococcus pyogenes
MKRMVKNGFINVMPSQVDKRYKQVVLAQVGRDKLPLLRECRKDIEHYFLKEITKEELLTAKKVIEQLKQNMLTYKGDNDA

SEQ ID NO: 333 - DNA, 870 bp, Streptococcus pyogenes
ttgttgggaaagtgggaaaatatgaaatcaaaacttggtgccacacttagaaaagttcgaaaaggaaagcaaattagtctgtgcttcgtggcagatgaacacctttcaaaatcacaaatctctcgttttgagcgcggggagtcagagatatcgtgtatccgactgatcaatattctagacaaattacacattactttggatgagtttcttattttacatgatgaagactataccaattccgaaacatttgctaacctggtacagtatattcgtaagcaatattcatcacaaaatatcaataatatagcatgtttactttccgacacttctgattacactctgaattcttttgagaaaacaatggtaaagtccattttacacacaatggattcaagcatcattccatcagatgatgaattacttcaactaacagattatctctttaaagttgaaaaatggggctactatgaaatccttttgttgggtaactgtgtacgaacaattaactacaactcctacttcctattgacaaaggagatgttaaataattacatttactcttcacggaacaaaactaataaacgaattgtcactcagcttgctataaattgtttcattcttagtatcaataaggaggaattttctaattgctcctatttaattgatgagataaaaaccttgttagataatgaattaaacttctatgaacagacagtttttctctatgcaacaggttactttgaatttaagcgccaattagaaactggagttgaaaagatgaaacaagccatacaagttcttgatattttaaatgaagacaagttaaaattacattacgctgaccattttgataaactagtcaacaaagat

SEQ ID NO: 334 - protein, 290 aa, Streptococcus pyogenes
MLGKWENMKSKLGATLRKVRKGKQISLCFVADEHLSKSQISRFERGESEISCIRLINILDKLHITLDEFLILHDEDYTNSETFANLVQYIRKQYSSQNINNIACLLSDTSDYTLNSFEKTMVKSILHTMDSSIIPSDDELLQLTDYLFKVEKWGYYEILLLGNCVRTINYNSYFLLTKEMLNNYIYSSRNKTNKRIVTQLAINCFILSINKEEFSNCSYLIDEIKTLLDNELNFYEQTVFLYATGYFEFKRQLETGVEKMKQAIQVLDILNEDKLKLHYADHFDKLVNKD

SEQ ID NO: 335 - DNA, 1596 bp, Streptococcus pyogenes
atggggaggattctaatgcagcttagaccttaccaagaagaggcaaggtcagcagtgcaacacgagtgggaagacggcaagaagagaactcttcttgtccttccaactggttgcggtaaaactattgtcttttcgaaaattatcgaagaccgtgtaaggctcggagagagagttttggttctggctcataggtccgaacttttagaacaggctagtgataaattgatgacagcaactggattagggacagcattagaaaaagcagagaatacttctttagggtcatggttcagggttgtagttggatcagttcaaacgatgcagagagagaagcgtttgagtaagtttcctacaaatcattttgacacaattattattgatgaagcccatcatgccatctctgatggttaccaaagagttttgcaacactttgatagtagcaatgttttgggagtgacagcgacaccagatcgcggtgacaaacaaaatctaggtaagtatttcgatagtttagcttatgaatattccttagtagatgccatcaagtctggttacttatctaaaattaccgcagttactatcccgttgactttggacttatctacagttagtcagcaagctggagattttaaagcaagtgagattgggacggcgcttgacccgtacctagaacaaattgccgatgaaatggtgaagcaatgcgcaaaccgtaaaacagttgtatttcttccgcttgttaaaacttcccaaaaatttcgtgatattctaaaccaaaaaggatttaaagcagcagaggtcaatggggaatcgaaagaccgcgctgaagtcctagaagactttgataatgataaatataatgtactatgcaattcaatgcttttaacggaggggtgggattgcccgacagtcgattgcgtagttgtactgagacccacaaaagtaagagctctttatagtcaaatggttggtcgtggcacacgattagcgccggggaaagaaaatctactattattagattttttatggcataccgaacgccatgaactttgtcgtcctgctcatctaattgcaaagacaccagaagttgctcaaaaaatggtcgataacatgacagaggaaactgaagtaacctttgaattgttagaagctgaagaagtagctagcaaagatgttgtcgcagaacgagaagaagcactcgctaagcagttagcagaaatgcgtaagcgtaaacgtgcattagttgatccgttgcaatttgaaatgtctatcaatgctgaagacttagtggactatgtaccagaattcggctgggaaatggctcctgtttctgataaacaaaagaacgctttagaaaaatttggtatttttaccgacgacattggaaatgcaggtaaagctactaaattattggagcgattggccaagaggagagaaactggcctaacaacacctaaacaaatcagaatgctagaacgatacggatttaaaaacgttggaatgtggaaatttgaagtagcatcaaacatgattaaccgcattgctgctagcggatggcgcctaccaaaaggcatcaatgctcgagaataccaacctgaa

SEQ ID NO: 336 - protein, 532 aa, Streptococcus pyogenes
MGRILMQLRPYQEEARSAVQHEWEDGKKRTLLVLPTGCGKTIVFSKIIEDRVRLGERVLVLAHRSELLEQASDKLMTATGLGTALEKAENTSLGSWFRVVVGSVQTMQREKRLSKFPTNHFDTIIIDEAHHAISDGYQRVLQHFDSSNVLGVTATPDRGDKQNLGKYFDSLAYEYSLVDAIKSGYLSKITAVTIPLTLDLSTVSQQAGDFKASEIGTALDPYLEQIADEMVKQCANRKTVVFLPLVKTSQKFRDILNQKGFKAAEVNGESKDRAEVLEDFDNDKYNVLCNSMLLTEGWDCPTVDCVVVLRPTKVRALYSQMVGRGTRLAPGKENLLLLDFLWHTERHELCRPAHLIAKTPEVAQKMVDNMTEETEVTFELLEAEEVASKDVVAEREEALAKQLAEMRKRKRALVDPLQFEMSINAEDLVDYVPEFGWEMAPVSDKQKNALEKFGIFTDDIGNAGKATKLLERLAKRRETGLTTPKQIRMLERYGFKNVGMWKFEVASNMINRIAASGWRLPKGINAREYQPE

SEQ ID NO: 337 - DNA, 3279 bp, Streptococcus pyogenes
atgaaagagaggaggaggacgatggcagctgatggtaaggtaacgatacttgttgacgttgatggtaagcaggtaaaggtactcaatagtgagttagataaagttgccaagcacggtgacaaaggcagctcctctcttaaaaaatttgcggttggtgcaggagtctttaaattagcttcggctgcagttgatttggttagtcaatctcttggcaaggctatcacaagatttgacacgcttgaaaaatatccaagggtcatgaaagctatggggcatagcgctgagtatgttgctagatcaactgataagttagcgaacggaattgatggactaccaacaactttagacgaggttgtcggaaccgctcaacgtttgacctctattactaaggatatcaataaatcaactaatctcacactagcattaaataatgcctttttagcttcaggagcttcatcagaggctgcaagccgagggctggagcagtatgcccaaatgctatcagctggtaaggttgatatgcaagcttggaaaaccctccaagaaacaatgccttatgccttgcaacaaactgcggaagcttttggatttgcaggggcatcagctcaaaaggatttttatgaggcattaaaaaacgggcaaataacatttgaccaattttctaataagttgattgagttaaatgatggtgtcggcggttttgcagaactagccaaagaaaatagtaaagggattgaaacctcttttaacaacatcaagaacgctattgcaaaaggtgtggccaacagcattaaggctttggatgatttatctaaggctgcaacaggtaagggcatagctgatcattttgatagtttgaaagttgttatcaatgcctcttttagcgccatcaatgcaagtattaaagctagtacatcgctatttaaacttttgtttagtgttattggtgctggaatatcagtcgtcaaagctctgtcgcctgccttagttggtgtagcatctggtctagctgccatgagggcagttaatgagactataacaatgattaaagcgctaaatagagcttgggttatggcatctgcatcaatgagtattggagcaacaaccattaagactgtgactgcggtacaagcggtaagtaccacgatgactaaagcagatatggttgcaagactatctcagttaggtgtcttaaaagccagtaccgtgatttatggtgttatgacaggcgctatcagtttatctactgctgcaaccatagccagtactgctgcggtaactgcgttaaaagcagcacttgtagccttaacaggtcccgttggttgggtagttggagctatcggtgctttagttgctgtcggagtaagcttatggtcatggctaactaaagagtcagacgagaccaaaaagctgaaaaaagagcaggaggggctagtcgaaagcaacaaacagctaagagattctgtccgtgagggcgtgcaagagcgtaagaagggccttgagtccgtcaaagagagcactgcagctcatcaaaaattagctgacgaaatcattaagttagccgccaaagaaaacaaaactgcaggcgaaaaacaaaacttaaaaaataagattgatcagcttaatgggtctattgatggcttaaacttggcctatgacaaaaactccaattctctttctcacaatgcagatcaaattaagtcacgcattagtgccatggaagcagaaagcacatggcaaacagcacaacaaaacctgttaaatattgaacagaaacgtagtgaggttagtaaaaagctagctgaaaatgccgagctacgtaaaaagtggaatgaagaagctaacgtctccgactctgtccgaaaagaaaagattgccgaactcacagaagaagagggtaagcttaaaaatatgcagactcaattgcaggaggagtataacaagacatcagctactcaacaagctgctgcagacgctatggctgccgctgaagaatcaggatcagcaagacaggttatagcgtacgaaaatatgtcagaagctcaacgaactgccatagacaatatgcgcactaagtactctgaacttttagagacaacgacatctatttttgatgctatcgaacaaaagactgctctgtcagtggagcaaatgaatgccaaccttgaaaaaaatagagctgctactgaacaatgggctacgaatttggaaattttagctcagcgtggtgtagaccaaggcatcttggaacagcttaggcggatgggacctgagggggcaacacagacacaggtttttgtggatgccacagatgccgagctagcacccttgcaggaaaactttagagcagccacagaaactgctaaaaatgcaatggggagcgttttagactcagcaggtgtggaaatgccagaaaaagttaaagggatggtcactaatgtttctacgggattacaggcggaactgcaagctgctaactttgctcaacttggtcaagaaatccctaatggggtttctcaaggtataagtcaaggggcaggtaaagcaagtgacgcaagtgtcaaaatgggtcaagaagttaaacgctctttccaaggagagttgggtatccactcgccatcgcgagtatttactgagtacggtggccatattactgatggcttgagtaatggtgtgacaaatggaacgtcaaaagttatgcaaaccatgcagagcttggctcaacagatgtctcaaaaaggacagcagattgttaatgacatgcgtagcaagtcgaaccaaatcacagatgcttttagcacgatgagtggtccaatgcactctcatggtgttaatgccatgcaaggtttggccaatggtatttatgcagggtcgggggcagctttagcggcagctcaaagcattgcggcacgtatcaccgcaacaattcaaagtgccttagatatccactcgccatctcgtgttatgagggatgaggttggacgttttatccctcagggtatcgctgtaggtattgatgcggatagaaaagtcattgactcatctatgcaaaagctaaaagagtcaatgacgattaatgcgaccccagaaatagcctctggatttggcggaggagttgcggggattgctaatcagaccacaaataactcaaataacagttttacccttaatgtcaaggttgatgaatccgacggtaatagccgcgagaaatatcaacgcttattcagagaatttagctggtatattcaacaacaacaaggaaggttaggtgatgttaaa

SEQ ID NO: 338 - protein, 1093 aa, Streptococcus pyogenes
MKERRRTMAADGKVTILVDVDGKQVKVLNSELDKVAKHGDKGSSSLKKFAVGAGVFKLASAAVDLVSQSLGKAITRFDTLEKYPRVMKAMGHSAEYVARSTDKLANGIDGLPTTLDEVVGTAQRLTSITKDINKSTNLTLALNNAFLASGASSEAASRGLEQYAQMLSAGKVDMQAWKTLQETMPYALQQTAEAFGFAGASAQKDFYEALKNGQITFDQFSNKLIELNDGVGGFAELAKENSKGIETSFNNIKNAIAKGVANSIKALDDLSKAATGKGIADHFDSLKVVINASFSAINASIKASTSLFKLLFSVIGAGISVVKALSPALVGVASGLAAMRAVNETITMIKALNRAWVMASASMSIGATTIKTVTAVQAVSTTMTKADMVARLSQLGVLKASTVIYGVMTGAISLSTAATIASTAAVTALKAALVALTGPVGWVVGAIGALVAVGVSLWSWLTKESDETKKLKKEQEGLVESNKQLRDSVREGVQERKKGLESVKESTAAHQKLADEIIKLAAKENKTAGEKQNLKNKIDQLNGSIDGLNLAYDKNSNSLSHNADQIKSRISAMEAESTWQTAQQNLLNIEQKRSEVSKKLAENAELRKKWNEEANVSDSVRKEKIAELTEEEGKLKNMQTQLQEEYNKTSATQQAAADAMAAAEESGSARQVIAYENMSEAQRTAIDNMRTKYSELLETTTSIFDAIEQKTALSVEQMNANLEKNRAATEQWATNLEILAQRGVDQGILEQLRRMGPEGATQTQVFVDATDAELAPLQENFRAATETAKNAMGSVLDSAGVEMPEKVKGMVTNVSTGLQAELQAANFAQLGQEIPNGVSQGISQGAGKASDASVKMGQEVKRSFQGELGIHSPSRVFTEYGGHITDGLSNGVTNGTSKVMQTMQSLAQQMSQKGQQIVNDMRSKSNQITDAFSTMSGPMHSHGVNAMQGLANGIYAGSGAALAAAQSIAARITATIQSALDIHSPSRVMRDEVGRFIPQGIAVGIDADRKVIDSSMQKLKESMTINATPEIASGFGGGVAGIANQTTNNSNNSFTLNVKVDESDGNSREKYQRLFREFSWYIQQQQGRLGDVK

SEQ ID NO: 339 - DNA, 729 bp, Streptococcus pyogenes
gtgaataagatgccaaaagaacaaccactctatctacagattgttgatgacttggaagtgaaaatcaaaaaaagcatgacagaaaacgataagttgttgtcagaacgagaattaagtgacctttacggtgttagtcgtatcacgattagactgactcttaaggaattggaattacgagacttaatttataaaaagcagggcaaggggacttatgtttcaggaatcaaagaacctgccactgatttatcaagtacttacagctttacagagcagatgaaaaaaatggggaaaactcctaaaacagagattctttcttttgaacagtatcaggtaacaccttacttgtctggtctcttagagcttgatcccgatacagaagtttttgaattagaacgcctaaggattgcagatgatatgcccttgatgtttgaacgatcctatattcctgctcagccttttcaggggttaagcattgcggacttaaagcgtaaagctttgtacgatatctttgcaaaggactatcaagaaacaatccgtcttgcagaagaagagttttatgccagcattgccttggactatgaagcaggtctcttaggcattaaaaagggagatcctgtcttacatattattcgtaaaacttataatgataaaaatatcttaattgaattgactttcagcattgcaagggcggatcagtttaggtaccgggtgcaacatcaccctaatggt

SEQ ID NO: 340 - protein, 243 aa, Streptococcus pyogenes
MNKMPKEQPLYLQIVDDLEVKIKKSMTENDKLLSERELSDLYGVSRITIRLTLKELELRDLIYKKQGKGTYVSGIKEPATDLSSTYSFTEQMKKMGKTPKTEILSFEQYQVTPYLSGLLELDPDTEVFELERLRIADDMPLMFERSYIPAQPFQGLSIADLKRKALYDIFAKDYQETIRLAEEEFYASIALDYEAGLLGIKKGDPVLHIIRKTYNDKNILIELTFSIARADQFRYRVQHHPNG

SEQ ID NO: 341 - DNA, 1290 bp, Streptococcus pyogenes
ttgttagaaggacaagaaatagtaatgactacctatgatagcatttcctggattcatacctttaaggctaatggtcgcaagaccgatttggccagaatggcttggttacttgaggcactaggccggccacaagacaaattccctgctattcacgttgttggaactaacggcaagggctctgtgacagcctacttacagcatatcctgtcaacttctggttatcaggtcggaacctttacatctccttttattatctcttttcacgatcggatttgccttaatggccagcccatttcagacctagaattggcgcaatgtgtgagcgtgattagacccattctcactaaaatgtctcttgaaacaaattgggatagacctaccgagtttgagttagtgacgctcataatgttttgctactttgccaatcttaaacctgttgatattgccattattgaggcagggattggtgggaaaaccgacgcaaccaatgtttttcatgctctggccgtcgtatgcccttctattagttttgatcaccaagaacgtttaggttatagcctagcagaaattgctcaccaaaaagcagaagttatcaaagctaaagaacccgttattatcggtcaacttgagcaggaggctagtcaagtctttcaacaagttacccaaaaagccggttcacgcttatatcaattaggaaaagattttttgctcaatccttcagaaaagacgttttcctttcaacacgataacttgaatttaaccaaactccgtctcaaactattaggtcaacatcaaaaagcgaatgcctgtttagccattatgacagctcaattacttagaaaatcctttcctaaaatatctccaaaaacgattcaaaaaggaattgaggcaacaacttggcctggccggtccgaatttattcaacctaatcttctattagacggcgctcacaatccagattccattgctaaattaaagtctctactgcaagaagaatttcccaaacgtcctattcatattctctttgcaggtctcaaacgtaagcctttagccgacttgctggctcaactagatacttttgaagtatctgtcacgacttttgatttccctgaagcaaatcttttagaggattatcctgataaatacccacaggtaaaagattacagagactggttacaaggttccgtaacatctgatgaactctttgttgttacagggtcactttattttatctccgaggtaaggcaatattgtctgagcaacgcaaatatctttaaaaacatattcccc

SEQ ID NO: 342 - protein, 430 aa, Streptococcus pyogenes
MLEGQEIVMTTYDSISWIHTFKANGRKTDLARMAWLLEALGRPQDKFPAIHVVGTNGKGSVTAYLQHILSTSGYQVGTFTSPFIISFHDRICLNGQPISDLELAQCVSVIRPILTKMSLETNWDRPTEFELVTLIMFCYFANLKPVDIAIIEAGIGGKTDATNVFHALAVVCPSISFDHQERLGYSLAEIAHQKAEVIKAKEPVIIGQLEQEASQVFQQVTQKAGSRLYQLGKDFLLNPSEKTFSFQHDNLNLTKLRLKLLGQHQKANACLAIMTAQLLRKSFPKISPKTIQKGIEATTWPGRSEFIQPNLLLDGAHNPDSIAKLKSLLQEEFPKRPIHILFAGLKRKPLADLLAQLDTFEVSVTTFDFPEANLLEDYPDKYPQVKDYRDWLQGSVTSDELFVVTGSLYFISEVRQYCLSNANIFKNIFP

SEQ ID NO: 343 - DNA, 123 bp, Streptococcus pyogenes
ttggagaaagaggttaagcagatgattgatttaaaaaggaatcttttcaaaattgatgtccgggcacaaaaggatgaagagaaagttttcatgcgtacggcgtggctagtttcttgtcagcct

SEQ ID NO: 344 - protein, 41 aa, Streptococcus pyogenes
MEKEVKQMIDLKRNLFKIDVRAQKDEEKVFMRTAWLVSCQP

SEQ ID NO: 345 - DNA, 102 bp, Streptococcus pyogenes
ttggagaaagaggttaagcagatgattgatttaaaaaggaatcttttcaaaattgatgtccgggcacaaaaggatgaagagaaagttttcatgcgtacggcg

SEQ ID NO: 346 - protein, 34 aa, Streptococcus pyogenes
MEKEVKQMIDLKRNLFKIDVRAQKDEEKVFMRTA

SEQ ID NO: 347 - DNA, 796 bp, Streptococcus pyogenes
gatgacatctaaaattaccattaaagatattgcacgagaagccggggtttctgtggcgaccgtatcttacgtgttaaaccagcgcaatgatcaaaaaatcagcgaagaaacccgcaataaagtgctacatattagtaaccttcttaactatacacctaatcaggcagccaggtcattagtcacacaacaatcaaacagtgttgtcctgtattacaaatatgcagatagcattttagctagggctgaacaactgcataccattagctttctatcccgcctattgcatgagcaggactatcagctggtttgcctaaatgaagatagcactgaaaaatttgactgggcagaccttattctgaccttggacgttgataatgataccttttacaaaattggaaagcttaatttcaaacccttaattgccattgatagctttgttaatgatcccctcttctttcaaattaatacagattatgctgctctcaaagatcaggctaatcagttttttaaggatgaaccttataccctgctttccttgcctatcactaatcgtgagcgatatgagcatgtttctgccttctttccaagtttgcacattgtaaacgacctaagagagctaacctactttgaaaaggaaaatcttttactcattgatgagagtttggatcaattctttgtgaactcttcgcaaaaactctactgcccacgtttttcccccaaaaaagggcaagttatcttagaggccatcgaatgggccaaaaaacgccagcctgataaaaaacataaccttctggtg

SEQ ID NO: 348 - protein, 266 aa, Streptococcus pyogenes
MMTSKITIKDIAREAGVSVATVSYVLNQRNDQKISEETRNKVLHISNLLNYTPNQAARSLVTQQSNSVVLYYKYADSILARAEQLHTISFLSRLLHEQDYQLVCLNEDSTEKFDWADLILTLDVDNDTFYKIGKLNFKPLIAIDSFVNDPLFFQINTDYAALKDQANQFFKDEPYTLLSLPITNRERYEHVSAFFPSLHIVNDLRELTYFEKENLLLIDESLDQFFVNSSQKLYCPRFSPKKGQVILEAIEWAKKRQPDKKHNLLV

SEQ ID NO: 349 - DNA, 1782 bp, Streptococcus pyogenes
atgagcagagacccaacatatacaataaacgagcacgacttatcttttgcagatggtcgtttttatgtgacctttaaggcagataagtcaagtgagactgtgagacttaacagtagttgccttggcaataccataatcaaaaagctacaggtcgaggatgacaatacaatgcacgactttgtaaagcctaaagttaccactcaacaagcttttggactagctcagcaggtcaaagagcttgatttacagctaaaagaccctaagtcagatttgtggggcaaaatcaagttcaataataaggcaatgctagtcgagtacgccaacaaagagatgtcaagtgccattgcgcaatcagctgagcagatattgttacaagtcaagtctattgatgatgaacgatattccaaatttgagcaaactctgaatggtatcaaacaaactgtcaaaagtgagtcagttgaatccgcacgtactcagctagcatcaatgtttgatagtcgtattagtggacttgatggcaaatacagtcgtttgagccaaacaattgatagtcttagcagtcgtcttgatgatggtgttggtaactactcaacgctatctcaaaaggtaagtggcattgatttacgagttagtaatgcagctaatgatgtttctcgattgtctcagacagcacaaggattgcagtcacaaatcacaaatgcaaaccaaaattacagcagtttgtctcagactgtacagggactacaaacaactgtacgtgataatcaatcaaatgctacaagtcggattaatcagttaagtgacctgatcagcacaaaggtatcaaaaggtgatgttgagacaactattgctcagagttacgacaagatagccttcgcaatcagggataaactcccagcaagcaaaatgtctggcagtgagattatctcggcaatcaatcttgataggtctggggttaaaatcactggaaaaaatatcactcttgatggtaacagctacatcagcaacgctgtcatcaaagatgctcatattgctaacatggatgccggtaagattaatactggttatcttaatgctaataggattgcaaccgaggccattactggtgagaaaattaagatggactatgccttttttaataaactcactgctaacgagggatattttaggacgttgtttgccaaagacatctttgcaacatcagtccaatctgtaacactatcagctagcaaaattactggaggtgtattagccgctacaaatggggcaagtcagtgggacctaaataatgccaatatgacctttaatcgagatgccacaattaattttaatagcaaaaacaatgccttagtacgtaaagatggcacacatactgcttttgtacattttagtaatgccacaccaaaaggctatagaggctcagcgttatatgcctctatcggcattacctcatcaggagatggcatcgacagcgcttcttccggtcgttttgcagggctaaggtcatttaggtacgctacgggatataaccatactgctgcagtcgaccaaaccgagctatacggtgataatgtcttgattgcagatgactttaacatcaatcgaggatttaaatttagaccagacaaaatggaaaaagtgctcgacatgaacgacttgtatgcggctgtagtagccttaggccgctgttgggggcacttggctaacgtcggctggaatactgctcatagcaattttacaagtgctgtgagtagggaattgaataactacatcactaaaatt

SEQ ID NO: 350 - protein, 594 aa, Streptococcus pyogenes
MSRDPTYTINEHDLSFADGRFYVTFKADKSSETVRLNSSCLGNTIIKKLQVEDDNTMHDFVKPKVTTQQAFGLAQQVKELDLQLKDPKSDLWGKIKFNNKAMLVEYANKEMSSAIAQSAEQILLQVKSIDDERYSKFEQTLNGIKQTVKSESVESARTQLASMFDSRISGLDGKYSRLSQTIDSLSSRLDDGVGNYSTLSQKVSGIDLRVSNAANDVSRLSQTAQGLQSQITNANQNYSSLSQTVQGLQTTVRDNQSNATSRINQLSDLISTKVSKGDVETTIAQSYDKIAFAIRDKLPASKMSGSEIISAINLDRSGVKITGKNITLDGNSYISNAVIKDAHIANMDAGKINTGYLNANRIATEAITGEKIKMDYAFFNKLTANEGYFRTLFAKDIFATSVQSVTLSASKITGGVLAATNGASQWDLNNANMTFNRDATINFNSKNNALVRKDGTHTAFVHFSNATPKGYRGSALYASIGITSSGDGIDSASSGRFAGLRSFRYATGYNHTAAVDQTELYGDNVLIADDFNINRGFKFRPDKMEKVLDMNDLYAAVVALGRCWGHLANVGWNTAHSNFTSAVSRELNNYITKI

SEQ ID NO: 351 - DNA, 2142 bp, Streptococcus pyogenes
atgataccagttttgtatgaggctaaggaaaccaagtttaggacttttggtctcggtgagattgcggatgcttatgaggttaaagccactcgtgagcgcaatggtaattactcactgtacatcaaatatccgctagatggtgtctttgcctcagtttttaaagaggaaatgaagattaagtctgacgctggtcgtagaaccaaatggcagacttttgagattaatcgggtactacgaaatagtaaagaccacatcgagatttttgcgcgtcatatctctatgcgcacacaggatattgctttaaaaccgtttgtaaacggtgcgagcgtaggagccgaatcagctttagaaatctggaagaaaaaccttgtcggtgatgataagtttgacgttaaaagcgacatcttaacgcttggtagctttaactgggaaattgataaaatcggcaatgcccgtggtgctctaggaggtgtcgctggctctatcctagatgtttacggtggtgagtacgagtttgacaaccgtacaatcatcttacgcaagcaaatggggcgtaaagctcccacggtattggagtatggccgtaatatcgtcagcgtagaggaggagcgattgctagatggcaattacacctctatctatccttacgtaagatatacgccacaaccaaaaccgcaagaggaaccccctggtaagccgcatgtaggcgagcataaacaacccgaagaacagctagtgacattgcctgaatttatcctagatggtcagtatctcagcttatatgctcagcgcagaatccaaatggttgatttatcaagtcattttaacgatgacaaaaataaaaaagagccaacgatcgaagaaatccgaaagctggctcagaaataccttaaggataataacgttggtgcaccaaaagtcagcattgaggttgattatattgacttgtcacaaacgcttgactatcaagattttagagtcatggaagaggttgagctttgcgacattgtaccactttattatccaaagtttggcatcacaactgagtctgaaaaagtcgttgagattgtctatgacgtctatacagatagcaaccatacaataaaacttggcacgattggtcagtccatctctaagagtttgacaggtggggtctcagagcgtatcaatgctttggaaaataaccaaaaggttatcaccaacagccagaagcagtttgaactcaatctgcctaaatacctcaatgacctcaatggtaaacgcgtttggtacgaaaaaccagatgacaatattgagcacaagataggcgactattggtttgaaaaaaatggcaagtatcagcgtacttggatttgggatggcaatcaatgggtcaaggtactagatacagaggatttaaaccccaatcaacgagcttttgatgccgcaatagccgaactcgaaaaagcaaaaaaagcgcaagaagaaatcaaccagcgtactgacaaagagcttgaagaatttagagccaccctcaaaaacctagctttaccagaagaagcgattaaaaaaatcacagaggctatcaaagttgatgacatcccgtctattaaacaaagctttgatgacctcaaaaatagagtgagtgagacaagcgaagaatctcgtttaactgccgaaattttaggaaacaacggtaaaacccgctacaacaaaaatttattggttggtgagcctaatcgcacgaagtcttacgaccaggattacatcgaggtagaagccaacgacggtggtttcaagcgtggcgagacctatacgattagctttagccagacatgtgagccactcaaaaaagtggctatcacgctgacacaggctaacaacaagggagttaagttagtgctgacaccaactaaagcaaaaatggagtcgcagacctttgacctcactaaagataaagaggctatcagtgtttatccgtttagctacacagtgcttgtaaccagcgactggtataaatctaagcagatagatttaaacgcgtcggaggtgaaggaattggctctggagatggattataaagagattgcagatgccaaaggtgcaactatcacaggggcatggtcagacagtccacaaattatattagacggaggtaaaaaa

SEQ ID NO: 352 - protein, 714 aa, Streptococcus pyogenes
MIPVLYEAKETKFRTFGLGEIADAYEVKATRERNGNYSLYIKYPLDGVFASVFKEEMKIKSDAGRRTKWQTFEINRVLRNSKDHIEIFARHISMRTQDIALKPFVNGASVGAESALEIWKKNLVGDDKFDVKSDILTLGSFNWEIDKIGNARGALGGVAGSILDVYGGEYEFDNRTIILRKQMGRKAPTVLEYGRNIVSVEEERLLDGNYTSIYPYVRYTPQPKPQEEPPGKPHVGEHKQPEEQLVTLPEFILDGQYLSLYAQRRIQMVDLSSHFNDDKNKKEPTIEEIRKLAQKYLKDNNVGAPKVSIEVDYIDLSQTLDYQDFRVMEEVELCDIVPLYYPKFGITTESEKVVEIVYDVYTDSNHTIKLGTIGQSISKSLTGGVSERINALENNQKVITNSQKQFELNLPKYLNDLNGKRVWYEKPDDNIEHKIGDYWFEKNGKYQRTWIWDGNQWVKVLDTEDLNPNQRAFDAAIAELEKAKKAQEEINQRTDKELEEFRATLKNLALPEEAIKKITEAIKVDDIPSIKQSFDDLKNRVSETSEESRLTAEILGNNGKTRYNKNLLVGEPNRTKSYDQDYIEVEANDGGFKRGETYTISFSQTCEPLKKVAITLTQANNKGVKLVLTPTKAKMESQTFDLTKDKEAISVYPFSYTVLVTSDWYKSKQIDLNASEVKELALEMDYKEIADAKGATITGAWSDSPQIILDGGKK

SEQ ID NO: 353 - DNA, 768 bp, Streptococcus pyogenes
atgaggaggaattacagtagagtcattgacgaactgcgtactgactacgggctgaatttagttgctattggtcaacgtttgggtaccgacccccgaacagttggtaaatggtggcagggtaaacataacccgaaccaagaaagcagaaagaaactgaataggctatatagagaggtgaaagaaactatgatgacacaagtaaatatttttgaagaagctaatgacaacacaaagcaggttatgcaagttattacaacgacaaattttcatggacaacctttagacatttacggtgatattcaggagcctttatttttggctagggcagtcgctgaaatgattgattacacaaaaactagccaagggtactatgacgtacaagctatgctaagaaaagtagatgaggatgaaaagcttaaaggaatggctttagaaggtactacgaaaaattttcgtagtggtcaaaaagtttggtttttaactgagcatggactttatgaagtgcttatgcgttcaaacaaaccaaaagccaaagagtttagaaaagcagtcaaaaacattctaaaagaaatccgcttgaatggctattacatgcaaggcgaattggtgcaagaactagctcaaccaagcacccaaaaactaccaggtataagtgacctaacttatatactaaataagctagctgatttagttgatatggataatctagctgatatttcaaatgggattgaccgagttcagcaactagtgaagctgatcagcttgtag

SEQ ID NO: 354 - protein, 255 aa, Streptococcus pyogenes
MRRNYSRVIDELRTDYGLNLVAIGQRLGTDPRTVGKWWQGKHNPNQESRKKLNRLYREVKETMMTQVNIFEEANDNTKQVMQVITTTNFHGQPLDIYGDIQEPLFLARAVAEMIDYTKTSQGYYDVQAMLRKVDEDEKLKGMALEGTTKNFRSGQKVWFLTEHGLYEVLMRSNKPKAKEFRKAVKNILKEIRLNGYYMQGELVQELAQPSTQKLPGISDLTYILNKLADLVDMDNLADISNGIDRVQQLVKLISL

SEQ ID NO: 355 - DNA, 714 bp, Streptococcus pyogenes
atgacaaagtatgaacgtatttataaagacctcgaaacaaaaataaacaaagacttttacaaagaaggggattttttacctactgaaatagaattgagtcaacaataccaagctagccgagataccgtccgcaaggctctctcacttctcacaaaggcaggtcttatcctcaaaaaacaaggacgtggcacccaagtgattagacatcatcagatcatgttccctatctcagaactaactagttatcaggaactcgtctcttactcaaatctagattctaagaccaacgtcattgccattgataaactgattgtggatgagacactttcaaaattgaccggttttagcaaaaacagcttggtctggcgtgttacacgccaacgcgttgttgagggtgtggcttccgtcttagacattgattaccttagtaaaactttggtgccaataatgacaagggaaatcgcagagcattctatttatcaatatttggaaaaggaactccatctcgccattgactttgccctcaaagaggttaccattgaccaaataaccgatcgtgataaaattttacttgaccttggatcagaccaacatgttgtttccgtcaaatccaaagtctacctttccaataataaccaattccaattcaccgagagtcgccataaactggaaaaatttaaatttttagattttgctcggcgcagaccaaaataa

SEQ ID NO: 356 - protein, 237 aa, Streptococcus pyogenes
MTKYERIYKDLETKINKDFYKEGDFLPTEIELSQQYQASRDTVRKALSLLTKAGLILKKQGRGTQVIRHHQIMFPISELTSYQELVSYSNLDSKTNVIAIDKLIVDETLSKLTGFSKNSLVWRVTRQRVVEGVASVLDIDYLSKTLVPIMTREIAEHSIYQYLEKELHLAIDFALKEVTIDQITDRDKILLDLGSDQHVVSVKSKVYLSNNNQFQFTESRHKLEKFKFLDFARRRPK

SEQ ID NO: 357 - DNA, 702 bp, Streptococcus pyogenes
gtgaggcaaaaagtgcattacaactttctttttttcgaccttgaccataccctacttgattttgatgcggcagaagaggttgctttgaccaagttgctagaagagtaccaggttattgatattaaggcttacaaggactactataagccgatgaatcagaacttatggaaacagttagaaggtggggatattagtaaagctgatttggttaactctcgctttgctctgctatttgctcattttggagtgacggttgatggcaggcagttagcagaaggttatcaaaagcatttaaaagatcaagggcaagtttatgctggtgctaaggagctgttagcggacttaactgcccaaggctataatctttatgcggcaactaatggcatcgcaacgattcaacaaggccgattgcaagcgtctggtttggcaccttacttcaaagccattttcatttcggaacagtcgggtagtcaaaaacctaaaaaagctttctatgattggatgacccagcaggtttccaattaccaacctgatcaagctttgatgattggtgatagtttatcggctgatgttcaaggtggaattaatgctggcatggataccttatggtacaacccaaagcatctcctgaataacagccctgttcatcctacctatgaggtgtcagattatcaagctctgctgaattgtattgcggagtaa

SEQ ID NO: 358 - protein, 233 aa, Streptococcus pyogenes
MRQKVHYNFLFFDLDHTLLDFDAAEEVALTKLLEEYQVIDIKAYKDYYKPMNQNLWKQLEGGDISKADLVNSRFALLFAHFGVTVDGRQLAEGYQKHLKDQGQVYAGAKELLADLTAQGYNLYAATNGIATIQQGRLQASGLAPYFKAIFISEQSGSQKPKKAFYDWMTQQVSNYQPDQALMIGDSLSADVQGGINAGMDTLWYNPKHLLNNSPVHPTYEVSDYQALLNCIAE

SEQ ID NO: 359 - DNA, 384 bp, Streptococcus pyogenes
atgacagaatgtatcttttgccatcagctcaaagcaaatcagctactgactcaaagtcaatatttcaaggttgtttttgatattgatcctatccaaaaggggcaccttttactgatttccaaagaccattacactagtctgacacaactaccaaaggaagggcactatgatctcatcgacttacaagccgctctagttgctaagctagagcagcaccttcccatttcaggcgttactagcgtcagcaatgacaaggagttgatggatgaggggactcattttcaccttcatttgattcctcgtttaactaatgatagcttttgggagggcatcaccattaatcaagaaaattgggaccttaccccctttttaaagcatttataa

SEQ ID NO: 360 - protein, 127 aa, Streptococcus pyogenes
MTECIFCHQLKANQLLTQSQYFKVVFDIDPIQKGHLLLISKDHYTSLTQLPKEGHYDLIDLQAALVAKLEQHLPISGVTSVSNDKELMDEGTHFHLHLIPRLTNDSFWEGITINQENWDLTPFLKHL

SEQ ID NO: 361 - DNA, 1041 bp, Streptococcus pyogenes
atgacaaaattattatacaaaaagatatatcatttcattaaagagcagatagcatcaggtcgtttgcaaattggtgaccgcctacctactgaaaaagaattgtcagaacagttctcggttagccgtatcacttctaagcgagcgcttgtagaactggagcaagaaggcttgattacgagaagtcgtgggaaaggaagcttcgtagctaaaaagcaagtgacgtcccctgaagcgaataaggatttattgttgattcttccttttgcttctgattatgaattgggagattatgctaagggaattatgacctccattgctgaaacaggttaccgtctcatggttcaattggccagtacagtaaggttagacaccctgtcagactatgctgggattatttattatcctgaagatgtcaatcacagtattgatttcctgttttactgcgaccatcatcacattcctctagtcttgttggataaatctctagatctttttcagtttccgtctgttgtagcggataataaaggcggtgcctgtcaattgactcagcacttgattgagcaaggctgtgaccagattagttttgtggcaacaggctcttttggagaagtatcatccgttagagaccgttatttgggttacttagcggcaatggcagaatcgtctctaaaatcccattattttcctaagacagagactgaaacaacagatgcttatttggaccgtttggtgaaaaccttatcggagacgacagccactaaaagggggcttgtcgtggaaaacgattggttggctattcagctgattcaaaaaatcacacaggtaggcttatctattcctgatcaagtcgctattgtaggctttgataatagtcaagcctcccgtttgttgagtcccaaattaagcacagcagctcaagatttttaccaaatggggcaagaagcagctaaagtcttgttgcagattattcatgagccagaccaagcagtggtgtcttgccagttacctgttcaagtatttatcagagaaagtagtcactaa

SEQ ID NO: 362 - protein, 346 aa, Streptococcus pyogenes
MTKLLYKKIYHFIKEQIASGRLQIGDRLPTEKELSEQFSVSRITSKRALVELEQEGLITRSRGKGSFVAKKQVTSPEANKDLLLILPFASDYELGDYAKGIMTSIAETGYRLMVQLASTVRLDTLSDYAGIIYYPEDVNHSIDFLFYCDHHHIPLVLLDKSLDLFQFPSVVADNKGGACQLTQHLIEQGCDQISFVATGSFGEVSSVRDRYLGYLAAMAESSLKSHYFPKTETETTDAYLDRLVKTLSETTATKRGLVVENDWLAIQLIQKITQVGLSIPDQVAIVGFDNSQASRLLSPKLSTAAQDFYQMGQEAAKVLLQIIHEPDQAVVSCQLPVQVFIRESSH

SEQ ID NO: 363 - DNA, 606 bp, Streptococcus pyogenes
atgaagattttattaattgatgaccacagactatttgcaaagagtatccaactgttattccaacagtatgatgaagtagatgtcatagatacgattacttctcattttaacgatgtgacgattgatttgtctaagtacgatattatattgcttgatattaatttagcaaatatttctaaagaaaatggattggagatagcaaaagaactcatacagtctactcctcatttgaaagttgttatgttgacaggatatgttaaatcaatctatagagagagggcaaaaaaagtaggagcatacggttttgtagataaaaatatagaccctaaacaactcatttctatcttaaaaaaagtggattctggaaaaaagtattttgaacaaatcgaatctcaggattatgttgaatctttaactgaccaggaaatagctatcttaaatttgagtaagaaaggattctctataaaagaaatagaggaaacgttacaaattagtaggagaacagtatttaatcatttgacccacatctactcaaagcttttggtaaataataagcaggaggctatctacaaagccgaacaattagggtattttatggatttctga

SEQ ID NO: 364 - protein, 201 aa, Streptococcus pyogenes
MKILLIDDHRLFAKSIQLLFQQYDEVDVIDTITSHFNDVTIDLSKYDIILLDINLANISKENGLEIAKELIQSTPHLKVVMLTGYVKSIYRERAKKVGAYGFVDKNIDPKQLISILKKVDSGKKYFEQIESQDYVESLTDQEIAILNLSKKGFSIKEIEETLQISRRTVFNHLTHIYSKLLVNNKQEAIYKAEQLGYFMDF

SEQ ID NO: 365 - DNA, 843 bp, Streptococcus pyogenes
atgacttggaaaattgtaacagattcaggatgtgatcttagaagtttgactagacaatccaaagagttgcgctttgaacgtgtgcctttgaccctacagattggcacagaaatttttagagatgatgatggattagatatcgataatatgatgacaactatgtaccagtcgtctaaagcaacgacatctagctgtccaagcccagaagcctttttgcaggcctatagaggtgcagataatgttatcgtgatgacaattacagggaccttatctggcagtcataatagtgcacgactggctaaaaatgaacttcttgaagaaaatcctaatgtcaatattcatctaatcgattctttatcagcaggtggcgagatggatttgctcgtactggagcttgagcggttgatcaaacttggattatcctttgaagaagttgtcaaacagatcacagcttatcagcaaaaaacacgtttgatttttgtgcttgccaaggttgataatttggttaaaaatggtcgactgagtaaattagtaggtaaagtaattggcttactcaatattagaatggttgggaaagctagcaataaaggaacgcttgaacttcttcaaaaagcgcgtggtcaaaaaaaagcagtttctgccttgatagaagaaattcaaaaagagggttatgtaggcggaaaagtttacattgctcatgctcaaaatccaaaaatttgtgagcagatcagtgaaaaaatcaaatctttatatcctgatgctgtgattcaaactggaaggacctcaggtttgtgtagcttttatgctgaagacggaggacttttaatgggctacgaaatttaa

SEQ ID NO: 366 - protein, 280 aa, Streptococcus pyogenes
MTWKIVTDSGCDLRSLTRQSKELRFERVPLTLQIGTEIFRDDDGLDIDNMMTTMYQSSKATTSSCPSPEAFLQAYRGADNVIVMTITGTLSGSHNSARLAKNELLEENPNVNIHLIDSLSAGGEMDLLVLELERLIKLGLSFEEVVKQITAYQQKTRLIFVLAKVDNLVKNGRLSKLVGKVIGLLNIRMVGKASNKGTLELLQKARGQKKAVSALIEEIQKEGYVGGKVYIAHAQNPKICEQISEKIKSLYPDAVIQTGRTSGLCSFYAEDGGLLMGYEI

SEQ ID NO: 367 - DNA, 927 bp, Streptococcus pyogenes
atgcttgtactttatgttagtagtaaactaattaaacgtaggaggatgaaatttatgtattctgcattgcttggtaatccagttgaacattctatatcagatgaattatttgaatatctaaatcacaacataggagttctggatgaatataaacataaaaaaattttggtagactcagtgtgtttagaagataaaatcaaacatctgataaatgatccaaaatgtattggattaaatataactttaccttataaaagagaggtaatgaggtatattgacaatttagacagagtagcagagataactggatctgttaacaatatttataaatctggaaatataattacaggaactaatactgattggaaaggtatttataatacattagttttctttaatattagccatataacaaaatgttgtgttttaggtactggcggtactgctagagctgctattttcgctttacaaaaactacaaatctcaccaacagttgtatacagggagccaattagtgagaatacaagaagtttgataaagagtttccctgatttaaagtatattacatataaggaattggctgatcaacaaattttaaatgatatggaaatcataataaatactacaccagttggtatgataaattatgaagaaagtttacctataaattttgatcatttggacaatgttaattataaagataaatactttatggatgtagttttcaatcctttacatacgaaacttcatgaatattttggtaaaaaaggagcaaaaataattgatggtttatgggttttgatttttcagggaattgaagcattttcattgtggagtgataaaattaatgatggtaaatattttttttcaaaagatgatgttgtcctaattcatacatttctagaagggaagataaaaggaaaatga

SEQ ID NO: 368 - protein, 308 aa, Streptococcus pyogenes
MLVLYVSSKLIKRRRMKFMYSALLGNPVEHSISDELFEYLNHNIGVLDEYKHKKILVDSVCLEDKIKHLINDPKCIGLNITLPYKREVMRYIDNLDRVAEITGSVNNIYKSGNIITGTNTDWKGIYNTLVFFNISHITKCCVLGTGGTARAAIFALQKLQISPTVVYREPISENTRSLIKSFPDLKYITYKELADQQILNDMEIIINTTPVGMINYEESLPINFDHLDNVNYKDKYFMDVVFNPLHTKLHEYFGKKGAKIIDGLWVLIFQGIEAFSLWSDKINDGKYFFSKDDVVLIHTFLEGKIKGK

SEQ ID NO: 369 - DNA, 825 bp, Streptococcus pyogenes
atggggttggggagtgattcgctacctgtaaaaatttccttatttgatgttgatacctatcttgcagattcgatgcagtttcacttagagtatatacttagactttttccaaagtcaggagttcattacttaatgcctacttttagaggagaagcagtagatcatcgacatttatcgcaattttatcatagtgagtgtgagatagagggagatttacactatgtgatgaatttagtggatagatatattaagtttctggttagtgaaattcttagagagtgtcgagatagtatttttgctataacaaaagatgtaagtcatttggaaagttttattgatcgaaagataccaattattacgtttgaagaggcttgtactatattggaaaatgaaatagattcattggaatataatgatgaacatcatttttatgtgttaacagatgttggggaaaagaaattaatggaacattttgagggagtagtttgggtaaaaaattatccctgtaaaagtgtccctttttatcaaaggttctcaacagatcatctatttgcctataatgcagatttgttgttaggaataggcgaaactgtaggttgtggagaaagatgcgaaacatatgaagaagttgtagaaaatatgaattatttacaagtagatgcttctgaatatagttggtatttagaaatgaaaaaaacaagacctatgaaatcttcaggatttggtttaggagtagagcgtttaatagcgtggatattgaagtgcgatgatgttcgaaaagttcaattaatcagtagagaaaatgggattgattatttaccataa

SEQ ID NO: 370 - protein, 274 aa, Streptococcus pyogenes
MGLGSDSLPVKISLFDVDTYLADSMQFHLEYILRLFPKSGVHYLMPTFRGEAVDHRHLSQFYHSECEIEGDLHYVMNLVDRYIKFLVSEILRECRDSIFAITKDVSHLESFIDRKIPIITFEEACTILENEIDSLEYNDEHHFYVLTDVGEKKLMEHFEGVVWVKNYPCKSVPFYQRFSTDHLFAYNADLLLGIGETVGCGERCETYEEVVENMNYLQVDASEYSWYLEMKKTRPMKSSGFGLGVERLIAWILKCDDVRKVQLISRENGIDYLP

SEQ ID NO: 371 - DNA, 762 bp, Streptococcus pyogenes
atgagaacaaacagcgaaattatttctttgatacagagcaaagtagaagaaagaaagatgtcaatgagtgagttggctagaaatgttggtattgcaaaatcaacgatgtctagatattttaataaaacaagagaatttcctttaaacagggcagatgattttgctaaagcacttaatatatcaacagagtttttacttggtattgatttaaatagcgaagtagatggttcggaactgcttggaatataccgcgaattagaagaacaacgaagagtaattgttttagatacagcaaaagagcaattggaagaacaaacaaaaatcatcaatttcagtgataaaaaaactgatatcgaagatatttttgaagttaaaggaacgacttttgctgcagcagcaagcggatttggtagaggttttgaagcagatgactatgatacttatacagtttatacagacgaagaacctccacattatgattatgctattggcataagaggcgatagcatgttaccaaagtacgagcaaggagatatgctttatatcgttgataaaggaatgtcaacatacagcggacaattatgtattgttgtacataacgggaacacttattttaaaaaagtttacactgaacatgatggacttcgattagtatcacttaataaaaaatatagcgatatttttattggctatccaccagcagaagatacatacattaaaatatatgacgttgttggtagttttacaccgattgaattttaa

SEQ ID NO: 372 - protein, 253 aa, Streptococcus pyogenes
MRTNSEIISLIQSKVEERKMSMSELARNVGIAKSTMSRYFNKTREFPLNRADDFAKALNISTEFLLGIDLNSEVDGSELLGIYRELEEQRRVIVLDTAKEQLEEQTKIINFSDKKTDIEDIFEVKGTTFAAAASGFGRGFEADDYDTYTVYTDEEPPHYDYAIGIRGDSMLPKYEQGDMLYIVDKGMSTYSGQLCIVVHNGNTYFKKVYTEHDGLRLVSLNKKYSDIFIGYPPAEDTYIKIYDVVGSFTPIEF

SEQ ID NO: 373 - DNA, 1188 bp, Streptococcus pyogenes
atgaaaaacatagttatcgttgaagctttacgaactcctatcggagcttttggaggctcctttaaaagtgtctctgctgttgaacttggaacaactgtactgaaaaaaatccttgataaaacgcaagtaaagcctgaaatggttgatgaagtcatcctaggaaacgtccttcatgcaggcctaggacaaaatgtggcaagacaagttgcagtccactcaggaattcctgaagataaaacagctttcacattagatatggtttgcggttctggacttaaagcaatccaattagctgcgcaaagcatcatgcttggtgacgctgatatcgttattgctggtggtgtcgaaaacatgtcacaagcaacctatgtatcaactcagcaccgttttggacagcgacttggtaatagtcaattgattgatactcttgttcatgatggcttaacagatgcttttaacaattaccacatgggtattactgctgaaaacgttgctcagaaatatggcatctcaagagaagagcaagatcaatttgctttagaaagccaagaaaaagctgctaaagcattagaaaatcatcgttttgctgacgaaattgtccctgtctctgtgcctcaacgacgcaaagaccctttaattgttacaacagatgaatacccaaaagttgatacaagccttgaaaaattacagcaattacgtcctgctttcctccctaaagaaggaaccgttactgctgggaatgcctcaggaataaacgatggtgcagccttattgatgttaatgactgaagaaaaagctcttgaattagggttaacacctttagtcactattgaaagctatgctagtgcaggtgttgcacctgaactgatgggaactggaccaattcctgccactcaaaaagcccttaagaaagctggattaacaatttctgatttggacttagtggagtccaatgaagcatttgcagcacagtccttggcggttttaaaagatttaaagttaaacccagaaatcgtgaatgttaatggaggagccatcgctttaggtcatcctattggtgccagtggcgctcgcattctagtcacattaatccacgaaatgaaaaaacgccaagtaaccagaggactagcaacactttgcattggtggaggacaaggaactgctgttatcgtgaaaaacaatacttag

SEQ ID NO: 374 - protein, 395 aa, Streptococcus pyogenes
MKNIVIVEALRTPIGAFGGSFKSVSAVELGTTVLKKILDKTQVKPEMVDEVILGNVLHAGLGQNVARQVAVHSGIPEDKTAFTLDMVCGSGLKAIQLAAQSIMLGDADIVIAGGVENMSQATYVSTQHRFGQRLGNSQLIDTLVHDGLTDAFNNYHMGITAENVAQKYGISREEQDQFALESQEKAAKALENHRFADEIVPVSVPQRRKDPLIVTTDEYPKVDTSLEKLQQLRPAFLPKEGTVTAGNASGINDGAALLMLMTEEKALELGLTPLVTIESYASAGVAPELMGTGPIPATQKALKKAGLTISDLDLVESNEAFAAQSLAVLKDLKLNPEIVNVNGGAIALGHPIGASGARILVTLIHEMKKRQVTRGLATLCIGGGQGTAVIVKNNT

SEQ ID NO: 375 - DNA, 351 bp, Streptococcus pyogenes
atgaaaagatatgaagtgactgtcaatggacaggtttatgaagtgagtttacgtgaactagttgatggagaaactgttgaagttagccagccagcagcacccgctactgagaaagaaatgaatgccaacgctgctggcggtggcattcaggtaaaggctccaatgtctggaacagtcttgtctatctttgctacagaaggaaaagctgttaaaaaaggagaagctgttctggtcttagaggccatgaaaatggagaatgaaattctagcacctgcagatggtctggtttcaaaaattcatgttgtggctaaccaaacggtcgagtctgaacaagttttgatttcattctag

SEQ ID NO: 376 - protein, 116 aa, Streptococcus pyogenes
MKRYEVTVNGQVYEVSLRELVDGETVEVSQPAAPATEKEMNANAAGGGIQVKAPMSGTVLSIFATEGKAVKKGEAVLVLEAMKMENEILAPADGLVSKIHVVANQTVESEQVLISF

SEQ ID NO: 377 - DNA, 1185 bp, Streptococcus pyogenes
atgactaaagaagtggtgatcacatctgcttatcgtaccccgataggaaattttggaggagtctttaaatctttatcagccgtagatttgggggtgacagttgttacaaaaattttagctgataccggtcttaaaagtgatgccattgatgaagtgatctttgggaatgtgttacatgcaggtctgggtcaaaatgttgcccggcaagtagcgctaaatgcggggctttcttatgatacccctgcttttacgattgatatggtctgtggttctggcttaaaagcagttgagttaggtgctcaaaagattcaaacgggcaacgctgatattgttttagttggtggtaccgaaaacatgagtcaagcaccttacgttttacaaggccaacgttggggatctcgtatgggagatagtaaagtagtagataccatgcttaaagatgggttgagtgatgcttttgcaggttatcacatgggtataacagccgaaaatattgtgcaacagtatggactgaccagagaagaacaagatgcctttgcagctgatagccaacgtaaagcccaacttgccatagaaaaaggtcgtttcaaagaagagattgcacctgtcactattcctcagcgtaaaggtgaacctttactcgttgatcaagatgaataccctaaatttggaacgacagtggataagttagcaaagttacgccctgcttttatcaaagatgaggggacagtaactgctggtaatgcttcaggaatcaatgatggagcagcggcaattttattgatgagtaaagaaaaagctgaagaattagggctccctattttagctaaaatcactagttatgcaagtgcaggtgtagacccaagtattatgggctgcggaccaatacctgctacgaaaaaggctcttgcaaaggctcagctgacaattgatgacattgatttgattgaagcaaacgaagcttttgctgctcaggctttagcggtttcacgagaccttggttttgacaatgaaaaagttaatgtcaatggaggagctattgctttgggtcacccgattggagcatcaggtgctcgtattttagtcaccttattagcagaaatggctaagcgtgatgtgagacatggcttagcaacgctttgtattggtggtggccaaggtcaaagtatcatcgtaacaagatag

SEQ ID NO: 378 - protein, 394 aa, Streptococcus pyogenes
MTKEVVITSAYRTPIGNFGGVFKSLSAVDLGVTVVTKILADTGLKSDAIDEVIFGNVLHAGLGQNVARQVALNAGLSYDTPAFTIDMVCGSGLKAVELGAQKIQTGNADIVLVGGTENMSQAPYVLQGQRWGSRMGDSKVVDTMLKDGLSDAFAGYHMGITAENIVQQYGLTREEQDAFAADSQRKAQLAIEKGRFKEEIAPVTIPQRKGEPLLVDQDEYPKFGTTVDKLAKLRPAFIKDEGTVTAGNASGINDGAAAILLMSKEKAEELGLPILAKITSYASAGVDPSIMGCGPIPATKKALAKAQLTIDDIDLIEANEAFAAQALAVSRDLGFDNEKVNVNGGAIALGHPIGASGARILVTLLAEMAKRDVRHGLATLCIGGGQGQSIIVTR

SEQ ID NO: 379 - DNA, 399 bp, Streptococcus pyogenes
atgatgttacgaaaatttaaaattaccattgacggtaaagagtatcttgtagaaatggaagaaatcggtgctcctgcccaagcagctgcccccgctcaaccaatatccactccagtacctgtccctactgaagcaagcccacaagtggaggaagcgcaagcaccacagccagtagctgcagcgggagcggatgccattccatcaccaatgcctggaaccatcttaaaagtcttagtagcagtgggagaccaagtaactgaaaatcagccactattgattttagaagccatgaagatggaaaatgagattgtggcctcatcagcaggaaccattacagctatccacgtcggtccaggtcaagtggtcaatcctggtgatggtctcattacaattggttaa

SEQ ID NO: 380 - protein, 132 aa, Streptococcus pyogenes
MMLRKFKITIDGKEYLVEMEEIGAPAQAAAPAQPISTPVPVPTEASPQVEEAQAPQPVAAAGADAIPSPMPGTILKVLVAVGDQVTENQPLLILEAMKMENEIVASSAGTITAIHVGPGQVVNPGDGLITIG

SEQ ID NO: 381 - DNA, 618 bp, Streptococcus pyogenes
atgattaaagctcagctaaagaatctaataaaaacaattcatctcgtaaaagaggctggtttctccctaaatggttcattgtacatggagttattgcatgattttacgcatgatgagttagtacataaccctataatcgaaagtacggttgatacaattcagtcagttgaatttgaaagggtttctttttcatataatggtaaggataatgtaataaacgatataagtttttcaattaaagcaggagagaggttagcaattgttggtggaaatggttctggaaaaagtacgattttcaaattagcctgcggtctttacgataattatgaaggcaatatatatataaatggtattaatctttgttcaatacagaaaaagtcatactacaagagaatatccgcattgttccaagattttttaaagtatgaattgacactgcgtgaaaatgttggattgggtgaattatcaaagttatatagtgatgagtcttataatacttcattttttaccacatcatgggattcagagaatgaactgcgattggaggatatttatataagatatagtgatggtaagtttcattttacaactatcgatgaatcgattaaacgggattga

SEQ ID NO: 382 - protein, 205 aa, Streptococcus pyogenes
MIKAQLKNLIKTIHLVKEAGFSLNGSLYMELLHDFTHDELVHNPIIESTVDTIQSVEFERVSFSYNGKDNVINDISFSIKAGERLAIVGGNGSGKSTIFKLACGLYDNYEGNIYINGINLCSIQKKSYYKRISALFQDFLKYELTLRENVGLGELSKLYSDESYNTSFFTTSWDSENELRLEDIYIRYSDGKFHFTTIDESIKRD

SEQ ID NO: 383 - DNA, 732 bp, Streptococcus pyogenes
atgatgacaaaaaaactaaacgttaaagtcttttcagacggtgcggtcttagagaccatgttaaaggatttacaaacaggtttggtcacaggctttacaaccaatccaagtttgatgaaaaaagcaggcatcagttcttatattggctttgccaaagaagtgcttgccaaaattacagactacccagtgtcctttgaagtctttgcggatgatctcgcaagcatggaaaaggaagctgagaaaattgccagtctaggtgacaatgtctatgtgaaaattccagtcaccacttcaacaggagaatcaacctgtcccctcattcaaaagttgtcagccaaaggcattaagttaaacgtcacagccatttttacaattgagcagactcaagctgtggttgatcatttaaccgctcgagttccagctattgtgtctgtttttgctggtcgtattgcagataccggcgttgacccaatgccaatcatggaagaagctctacgcatttgtcgtcaaaaagaaggggtcgaattgttgtgggctagtcctcgtgaaacttataatatctatcaagctgatcagctaggcgtggacattatcacttgtaccactgatttgattgccaagttgcctcttcaaggaaaagatttagaagactattcccttgaaaccgtgcaaatgtttctgaaagacagtaccagcctcggctttaaaattttagaggattacaatcattaa

SEQ ID NO: 384 - protein, 243 aa, Streptococcus pyogenes
MMTKKLNVKVFSDGAVLETMLKDLQTGLVTGFTTNPSLMKKAGISSYIGFAKEVLAKITDYPVSFEVFADDLASMEKEAEKIASLGDNVYVKIPVTTSTGESTCPLIQKLSAKGIKLNVTAIFTIEQTQAVVDHLTARVPAIVSVFAGRIADTGVDPMPIMEEALRICRQKEGVELLWASPRETYNIYQADQLGVDIITCTTDLIAKLPLQGKDLEDYSLETVQMFLKDSTSLGFKILEDYNH

SEQ ID NO: 385 - DNA, 219 bp, Streptococcus pyogenes
atgcttaggacgggcaacactttcttttctggcataaatgctcctttctcaacacacgggtcactaaaacccaaaaaagccacccctatcagaggtggcctgactactaaagggattatcccaattatagcagaaaattgttttaaaacagtgggactgctcaacactaataaagaattttatcagccaagaattcaccaaccatttaaaaatacttga

SEQ ID NO: 386 - protein, 72 aa, Streptococcus pyogenes
MLRTGNTFFSGINAPFSTHGSLKPKKATPIRGGLTTKGIIPIIAENCFKTVGLLNTNKEFYQPRIHQPFKNT

SEQ ID NO: 387 - DNA, 624 bp, Streptococcus pyogenes
atgaacaaaacagaaacatggaacggatatactatccgatttgtagagcaccaaggcgaatggtgggcggtgctagctgatattgctaaagcactagatctgaatccaaaatttattaaacaacgtttgggggatgaggttgtttcaaacaaccacgtcacagacagtttagggcgtcaacaagaaatgttaatcgttaatgagtttggcatttatgaaactatcttctcaagtcgtaagaaggaagccaaaacctttaaattatgggtatttgaaaccattaaacagttaagacaaagcacaggtctagagggcttccaagtatttagaatgtttgataaagaacatcagaagaaagctatgaataggcttgtcgatggcttacaaaatgcaactaagaaagaccttatcaaagccaacacgattgccaataaagcggtatctaataagtatggattaccaaagatggttagtaaaaacgagatgacagaaaacatgttgcgagaccgtgagcctatccttgatgaaacggttgaactaatcaaggttaaagaaaaatacggcttaaattttagcgtatctgaagctatctataaccaaaacacaataaaaaaagcgcagtga

SEQ ID NO: 388 - protein, 207 aa, Streptococcus pyogenes
MNKTETWNGYTIRFVEHQGEWWAVLADIAKALDLNPKFIKQRLGDEVVSNNHVTDSLGRQQEMLIVNEFGIYETIFSSRKKEAKTFKLWVFETIKQLRQSTGLEGFQVFRMFDKEHQKKAMNRLVDGLQNATKKDLIKANTIANKAVSNKYGLPKMVSKNEMTENMLRDREPILDETVELIKVKEKYGLNFSVSEAIYNQNTIKKAQ

SEQ ID NO: 389 - DNA, 984 bp, Streptococcus pyogenes
gtggtcattattgctgtggtgattttttttggagtgatactaggtattttgatagttgaatatggtcaaaagcgctccttttcaagttggttggttgagaaaatgtttgcttatagaaagtataagttatctaaaaaagttgataattataagggggttgagacgcagcgtaatcgtaatatcccttatcatctagataatcctgaagagatagtaggtttttcaactcaagaatacgatgtgaacgggatgcaagtttttatcattaatgatcaaaagcaaagtcatcagcctgttatttattatctttatggcagtgtctatttacgacgacccgaaaaacttcattttaagacggttaagcatcttatacagctgactaatgccaaggttgtttttcctaactttcctaaagtaccgtatgctacttatcaagatgtctatcctaaattagttgaagcttaccagcaattttgcttgtctaatggaccgagtcaagttagtgtcattggtgattcttctggtgggggtatggctttggcgtttgctaagtatatacgagatactaaaacagcaccccagccaaagcaattaattcttatatctccttggttagatgttagttttaaaaatcaagcctacaaggattttgaagcagaagaagcttacctagatgctcgtcgtcttcgtgatataggtgaactatgggcaggtggtcaaggtaatatgcaacttccttatgtcagtcctttgtatggtgattatgaggatttgcctgaaataacgacctttgttgggacaaaagagattttttacccagacattatgtctttacatgatcaattaacaagacaacgaattgctaatcagctgattattgcagaaaaaatgattcatgcgtatgttatttttccaataagagaagctaagcaagctcgaaaacaaattgcagaactagtgttgaaaacagtagagcatacctga

SEQ ID NO: 390 - protein, 327 aa, Streptococcus pyogenes
MVIIAVVIFFGVILGILIVEYGQKRSFSSWLVEKMFAYRKYKLSKKVDNYKGVETQRNRNIPYHLDNPEEIVGFSTQEYDVNGMQVFIINDQKQSHQPVIYYLYGSVYLRRPEKLHFKTVKHLIQLTNAKVVFPNFPKVPYATYQDVYPKLVEAYQQFCLSNGPSQVSVIGDSSGGGMALAFAKYIRDTKTAPQPKQLILISPWLDVSFKNQAYKDFEAEEAYLDARRLRDIGELWAGGQGNMQLPYVSPLYGDYEDLPEITTFVGTKEIFYPDIMSLHDQLTRQRIANQLIIAEKMIHAYVIFPIREAKQARKQIAELVLKTVEHT

SEQ ID NO: 391 - DNA, 687 bp, Streptococcus pyogenes
atgtataagattttagccatagatgatgataaagaaattctgaagcttatgaagactgctttggagattgaaaattatcatgttataacctgtcaagagatagaattaccaatagtttttgatgattttaaaggatatgatttgatcttattggatatcatgatgcctaatataagtggaactgagttttgttataaaattcgggaagaagttcattctccaattatttttgttagcgctttagatggcgataatgaaattgtccaagctttaaatatagggggagacgattttattgtgaaaccatttagcttaaaacaattcgtagctaaagttaactctcatttgaagagagaagagagagcaaagataaagaatgaggctgaggagagagtgaagcgtagttttccacctatagaaatctatctagaggaacgtatgttatatattgataaacagccgttattcctgacttatagagagtacgaaattttagaattactgtcacgtcatccgtataaagttttcacaaaagaagagatatatgaacaagtatatagcgatgaagcttcagcattgtttcattctatttcagaatatatctatcagattagaatgaaattttcaagttttggaattaatccaataaaaactattcgcgggattggttataaatgggatgtttaa

SEQ ID NO: 392 - protein, 228 aa, Streptococcus pyogenes
MYKILAIDDDKEILKLMKTALEIENYHVITCQEIELPIVFDDFKGYDLILLDIMMPNISGTEFCYKIREEVHSPIIFVSALDGDNEIVQALNIGGDDFIVKPFSLKQFVAKVNSHLKREERAKIKNEAEERVKRSFPPIEIYLEERMLYIDKQPLFLTYREYEILELLSRHPYKVFTKEEIYEQVYSDEASALFHSISEYIYQIRMKFSSFGINPIKTIRGIGYKWDV

SEQ ID NO: 393 - DNA, 1332 bp, Streptococcus pyogenes
atggaatcctatatcacacctaaacatcaagaggcctgtgtagctgccattaaacagatcgtttcttacccttctgtttgtcatgaaggagaaaatggcacaccttttggacaggccattcaagatattctcgaagcaaccttagacttatgtcaaggtcttggttttcatacttatattgatcctgaaggttactatggctatgctgagttaggtgaccaaaaagaggtcttggctattctttgccatttggacgttgttccagaaggagatcgtcagttatggaagacagatccttttgactgtgttgaggcagacggctgtttatttggtcgaggcactcaagacgataaagggcctactatgatggcgctatttgccaccaaagccttgatagatgcaggcgttacctttaataaacgcattcgttttattttcggaacagatgaagaaactttgtggcggtgtatgaatcgctacaatgatgtagaagaacaggctacctttgggtttgctcctgattcaagtttccctttaacctatgccgaaaaaggcctacttcaggcaaaattagtggggaaaggttctgataaactgtcacttgaaatcggacaagcctacaatgttgttcctgcaagagcctcttatcaaggtgataagcttgaggctttacaaaaagaactagataagcttggctttgagtacgtcgtcaaagagggagaattaacggtttatggtctcgcccaacatgctaaagatgctcccgatggcatcaacgctatgattaggcttgccaaggctttagtggtccttgaacctaacaaaacccttgattttcttgctaatgtcattgatgaagatggcagagcacttaatatttttggcagaatcgaagatgaaccttcaggcaaattaagctttaatgccgcagggcttaccttaaccaaagacaaggcagaaattcgcctagatattcggattccagttttggcagataaggaaaaattagtccaacaattaagccaaaaagcacaagaatacggcctaacctatgaagaatttgattatttggccccattatatgtgccattagacagtgaattggtaacaaccttgttatctgtctatcggaaaaaaacaggtgatcaaagccctgcccaatcatcaggaggggcaacctttgctagaacaatgaagaattgtgttgcctttggtgcccttttccctgatgctgttcaaacggaacaccaagaaaatgaacatattgttttagcggatgcttaccgcgctatggatatttatgcggaagctatttaccgactaacgcgataa

SEQ ID NO: 394 - protein, 443 aa, Streptococcus pyogenes
MESYITPKHQEACVAAIKQIVSYPSVCHEGENGTPFGQAIQDILEATLDLCQGLGFHTYIDPEGYYGYAELGDQKEVLAILCHLDVVPEGDRQLWKTDPFDCVEADGCLFGRGTQDDKGPTMMALFATKALIDAGVTFNKRIRFIFGTDEETLWRCMNRYNDVEEQATFGFAPDSSFPLTYAEKGLLQAKLVGKGSDKLSLEIGQAYNVVPARASYQGDKLEALQKELDKLGFEYVVKEGELTVYGLAQHAKDAPDGINAMIRLAKALVVLEPNKTLDFLANVIDEDGRALNIFGRIEDEPSGKLSFNAAGLTLTKDKAEIRLDIRIPVLADKEKLVQQLSQKAQEYGLTYEEFDYLAPLYVPLDSELVTTLLSVYRKKTGDQSPAQSSGGATFARTMKNCVAFGALFPDAVQTEHQENEHIVLADAYRAMDIYAEAIYRLTR

SEQ ID NO: 395 - DNA, 327 bp, Streptococcus pyogenes
gtgaaaaacaaattatttttagttgcccttgcgaccgtaactgtcctagggccgtctttagcaacccctcatcaccagaccgtgcatgctagtgatgtaacattaactgagacatgtgataaaaacggaacagtatgttttggctacgaaaacgtagatggtgaagtatgtaaattaacagctgacggaaagggaaccatttgtgtgggttacgaaaatagagacataaaagagagtgaaacttctagcaccaaaaatgattgttctaattggttttggtgctttttaaattatctttggactacaataaaaagctgggtttcgtaa

SEQ ID NO: 396 - protein, 108 aa, Streptococcus pyogenes
MKNKLFLVALATVTVLGPSLATPHHQTVHASDVTLTETCDKNGTVCFGYENVDGEVCKLTADGKGTICVGYENRDIKESETSSTKNDCSNWFWCFLNYLWTTIKSWVS

SEQ ID NO: 397 - DNA, 336 bp, Streptococcus pyogenes
atgacggaaccatccaacttagaagctattatgggcttaatcatgtatggaggcgaagccaagggcaaggccgtagaggctattcatgcagcacgagatgggcagtttgaggaggctcagcacttacttcaagaagcgacaaactcgttaaatattgcccataaatcgcagacacatttgctgtcccaagaagcagctggtgatgcggttgaattgtctttattgatggtgcatgggcaagatcacatgatgactgccttagcctttattgatttagccaaggaattggttaccgtttacgacaaaatgtcagcaatacaaagaggtgagtcatga

SEQ ID NO: 398 - protein, 111 aa, Streptococcus pyogenes
MTEPSNLEAIMGLIMYGGEAKGKAVEAIHAARDGQFEEAQHLLQEATNSLNIAHKSQTHLLSQEAAGDAVELSLLMVHGQDHMMTALAFIDLAKELVTVYDKMSAIQRGES

SEQ ID NO: 399 - DNA, 738 bp, Streptococcus pyogenes
atgaaacaattagtattaaaagatgtttgcaaaaaatatcccaatcaactgaattatgctctagaccatatcaatttgattgtggaaaaaggagaatttgtagctgtcatggggcgtagcggtagtgggaaaacgacgcttttaaatgttacttcaattattgataaaattgatagtgggaatatttattgtgcggataaagagattagcacattctctgataaggaggcaactaattttagaaaaaatgatattggttttgtttttcaagattatatgctgttagatagtctaaccattagggagaatatttctgttgctttgtctctaaaaaatattgattcttcaaagattgatgatttgataaatagctatgcaaaaagatttaatttatatgaacagttgaagaaatatccgtatcaactttctggaggtcaaagacagagggtcagtattatcagagcaatcattaaagaaccagagattatttttgctgacgaaccaactggagcacttgacttgaaatcttctgaggaaacaatgatgattttgagtgaaatcaataaaacagaaaaggtaactattttaatggttactcatgacgttttatcagcttcttatgctgacagagttatactcctcaaagatgggaaacttcacatggagattgataaaaaagattgtggagagtcgttttacgatgtaattagtcaagctttatccgatagaggagagtaa

SEQ ID NO: 400 - protein, 245 aa, Streptococcus pyogenes
MKQLVLKDVCKKYPNQLNYALDHINLIVEKGEFVAVMGRSGSGKTTLLNVTSIIDKIDSGNIYCADKEISTFSDKEATNFRKNDIGFVFQDYMLLDSLTIRENISVALSLKNIDSSKIDDLINSYAKRFNLYEQLKKYPYQLSGGQRQRVSIIRAIIKEPEIIFADEPTGALDLKSSEETMMILSEINKTEKVTILMVTHDVLSASYADRVILLKDGKLHMEIDKKDCGESFYDVISQALSDRGE

SEQ ID NO: 401 - DNA, 318 bp, Streptococcus pyogenes
atgaatagagaagaaactactcttttaggttttgaaatcgtagcctatgctggtgatgcccgttcaaaatttttggaagcgcttaaagcagcgcaagaaggagattatgctaaagcagaagaattaatcgctgcaggtagtgactgcttgaatgatgctcacaatgctcagacaagtctactacaaaaagaagcagctggagatgacttagcttatagtgtcactttaatgcatggtcaagatcatttaatgacgaccattttattacaagatttaatgaaacacatgattgaactttataagagaggagcaaaataa

SEQ ID NO: 402 - protein, 105 aa, Streptococcus pyogenes
MNREETTLLGFEIVAYAGDARSKFLEALKAAQEGDYAKAEELIAAGSDCLNDAHNAQTSLLQKEAAGDDLAYSVTLMHGQDHLMTTILLQDLMKHMIELYKRGAK

SEQ ID NO: 403 - DNA, 213 bp, Streptococcus pyogenes
atggtaactattgcagaattaagagctaaacataataagatgtcacagcgtgaattggcaaaagaattaggtgttactcaaacatctatcagcaactgggaaaaagaccagacaaagatttcaggtgagtatcttattagtctagctttgtttttcgatgtatctaccgatgacattcttgggataaacaagcaagcaacacaaaaattttaa

SEQ ID NO: 404 - protein, 70 aa, Streptococcus pyogenes
MVTIAELRAKHNKMSQRELAKELGVTQTSISNWEKDQTKISGEYLISLALFFDVSTDDILGINKQATQKF

SEQ ID NO: 405 - DNA, 1443 bp, Streptococcus pyogenes
atgttagcatttccaaaagagttttggtggggaggagccacctcaggccctcaaagtgaggggcgttttgctaagcagcaccgcaatctctttgattattggtatgaagaggagcctgacttgttttacgattacgtgggacctgatacggcttcggatgcctatcatcagattgaatctgatttgaccttgttagcttcactaggtcacaattcttaccgtacctccattcagtggacacgtttgattgatgactttgagcaagcgacgattaatcctgatggccttgcctattataatcgagtgattgatgcttgcttggccaatggtattcgtcctgttattaatttgcatcattttgacctgccaattgccctctatcaagcctatggtggctgggaatcaaagcatgttgtggacttatttgtcgcctttagcaaggtttgttttgagcagtttggtgatcgggttaaggattggtttgtccacaatgaacctatggtcgttgtggaaggctcttatttaatgcaatttcattaccctgctatcgtggatgggaaaaaagcagtccaggtcgcctataatctagccctagccacagccaaggttattcaagcttacaggcgaggtccagcagaacttagtgatgggcgtattggaaccattctcaatctgacgccagcctacccagctagtcaatcagaagcggatatggctgctgcgcattttgcagaactttggaacaatgacttgtttatggaagctgctgttcatgggaaattcccagaagaattggttgcggtattgaaaaaagatggggttttgtggcaatcaacgccagaagagttggctcttattgctgagaatagagtggattatttgggattgaatttttaccaccctaagcgcgtgaaggctcctgatgccattccagtgattagcccatcttggagtcctgaatggtattatgatccctacctgatgcctggccgccgcatgaacgtggataaggggtgggagatctatcctgaggctgtctatgatattgccatcaagatgcgagaccattacgacaatattccttggttcttatctgaaaatggtgtagggatttcaggagaagaccgttaccgtgatgaaactggtcagattcaagatgattatcgcatccaatttttgaaagaacatttaacctatctccacaaaggaatagaagcaggctcgaattgttttggttaccatgtatggacaccaattgatggctggtcttggctcaatgcctacaaaaaccgctatggccttgtggaaaataatatccatacccaagtgcgacgacctaaagcttcagcttattggtttaaaaaagtagctactcataaccgcttgatttcattagaagtaatggaggagtttggaggctctgcttctcacctcagtgattga

SEQ ID NO: 406 - protein, 480 aa, Streptococcus pyogenes
MLAFPKEFWWGGATSGPQSEGRFAKQHRNLFDYWYEEEPDLFYDYVGPDTASDAYHQIESDLTLLASLGHNSYRTSIQWTRLIDDFEQATINPDGLAYYNRVIDACLANGIRPVINLHHFDLPIALYQAYGGWESKHVVDLFVAFSKVCFEQFGDRVKDWFVHNEPMVVVEGSYLMQFHYPAIVDGKKAVQVAYNLALATAKVIQAYRRGPAELSDGRIGTILNLTPAYPASQSEADMAAAHFAELWNNDLFMEAAVHGKFPEELVAVLKKDGVLWQSTPEELALIAENRVDYLGLNFYHPKRVKAPDAIPVISPSWSPEWYYDPYLMPGRRMNVDKGWEIYPEAVYDIAIKMRDHYDNIPWFLSENGVGISGEDRYRDETGQIQDDYRIQFLKEHLTYLHKGIEAGSNCFGYHVWTPIDGWSWLNAYKNRYGLVENNIHTQVRRPKASAYWFKKVATHNRLISLEVMEEFGGSASHLSD

SEQ ID NO: 407 - DNA, 1590 bp, Streptococcus pyogenes
atgtatgtaagtaagttgtttacaagtcaacagtggagagaactaaaattaatctcatacgtaacagaaaacgctgacgccattggcgtcaaagataaagaactcagcaaagctctcaacatctccatgttaacattgcaaacatgtctcactaacatgcaatttatgaaggaagtgggaggaattacctataaaaatggttatattacaatctggtaccatcaacattgcggtttgcaagaagtctatcagaaagctctgagacactctcaatcatttaaattgctggagaccctttttttcagagacttcaactctttggaagaattagctgaagagctctttgtgagcctttcaacactcaagcgtctcatcaaaaaaaccaatgcctatttgatgcatacctttggtattactattttaactagtcccgtacaagtatcaggagatgaacaccagattcgactattttacctcaagtatttttcggaagcctataaaatctcagagtggccttttggggaaatcctaaacttaaagaactgtgagcggctactcagtttaatgataaaagaggtcgatgtgagggttaattttacattatttcagcaccttaaaatactaagctcagttaacttgattcgttattacaagggacactctgccgtctacgacaacaaaaaaaccagtcaacgtttttctcagctcatccaatcatccttagaattccaagacctttcacgcttgtttcacctcaaatttggactatacctagatgagactaccatagctgagatgttctctaatcacgttaatgaccaattagaaatcggttatgcgtttgatagcatcaaacaagactcaccaacgggctgtcgaaaagtgaccaactgggttcatctccttgatgagttagaaatcaggctcaatctcagcgtcaccaacaaatacgaagtagctgtcatccttcataacactaccgtattgaaagaagaagatatcacagctaattacctatttttcgattacaaaaaaagttacctcaacttttacaagcaagaacaccctcatctttataaagcatttgtagcaggtgtagaaaaactgatgcgttcagagaaagaacctatcagcacagagttgactaaccaattgatctacgcctttttcatcacttgggaaaatagtttcctaaaagtaaatcaaaaagatgaaaaaattcgtcttctggtgattgaaagaagttttaacagtgttggtaatttcctaaaaaagtacgtcggagagttttttagcatcacaaacttcaatgagctagatgctctgaccatcgatctagaagagattgaaaaacagtatgatgtgatcgtgacagatgttatggtaggaaaaagcgaagagctagaaattttctttttccacaaaatgattccagaagcgattattgacaagctcaatgcgtttttaaacatcagctttgcagacagcttgccactagacaaacccatcaaccccttggactttcatcgcaaagaggttatcttacccactccccccaacaagttgcatgcccccccctccacaacttag

SEQ ID NO: 408 - protein, 529 aa, Streptococcus pyogenes
MYVSKLFTSQQWRELKLISYVTENADAIGVKDKELSKALNISMLTLQTCLTNMQFMKEVGGITYKNGYITIWYHQHCGLQEVYQKALRHSQSFKLLETLFFRDFNSLEELAEELFVSLSTLKRLIKKTNAYLMHTFGITILTSPVQVSGDEHQIRLFYLKYFSEAYKISEWPFGEILNLKNCERLLSLMIKEVDVRVNFTLFQHLKILSSVNLIRYYKGHSAVYDNKKTSQRFSQLIQSSLEFQDLSRLFHLKFGLYLDETTIAEMFSNHVNDQLEIGYAFDSIKQDSPTGCRKVTNWVHLLDELEIRLNLSVTNKYEVAVILHNTTVLKEEDITANYLFFDYKKSYLNFYKQEHPHLYKAFVAGVEKLMRSEKEPISTELTNQLIYAFFITWENSFLKVNQKDEKIRLLVIERSFNSVGNFLKKYVGEFFSITNFNELDALTIDLEEIEKQYDVIVTDVMVGKSEELEIFFFHKMIPEAIIDKLNAFLNISFADSLPLDKPINPLDFHRKEVILPTPPNKLHAPPSTT

SEQ ID NO: 409 - DNA, 162 bp, Streptococcus pyogenes
atgttaaaatttacttcaaatattttagctactagtgtagctgaaacaactcaagttgctcctggaggctgctgttgctgctgtactacttgttgcttctcaattgctactggaagtggtaattctcaaggtggtagcggaagttatacgccaggtaaataa

SEQ ID NO: 410 - protein, 53 aa, Streptococcus pyogenes
MLKFTSNILATSVAETTQVAPGGCCCCCTTCCFSIATGSGNSQGGSGSYTPGK

SEQ ID NO: 411 - DNA, 1143 bp, Streptococcus pyogenes
atgtggatagaagaaactgataacggtaaattcaaatttcgtgaaaattataaagatccttacactggaacatggaaacctgtatccgttactatggagaaggataattcaagagcttataaagcagctcgaaaaatccttgaacaaaaaataacagaaaaaatagcgcaattaaaggcctctgagttacttttcacggaacttttagatgaatggtgggcgttttataagaaagaacttaaaaggtcgtctgtagcttctctgagaggtaatatcgaagagataagggaaacttttggaataggtgttaaagtagtgaatattgatcctaaatacgttcagaattatctcgataacctagattgctctaggaataaaaaagagcgtaataagtctatgctaaacttagcatttgattatgctgttggtttggatattatccaagataatcctgcaagacgtgctaaactcccaagggtaaagaaaactcttgaagactggaaaaaggctgaagaaaaatatcttgaagaagatgaaattaaaccattattgaaagaattgtacagaagacctagcacttaccgacttggtttgttggctgagtttatcagtttgaacggttgtcgtatcggtgaagctgtcagcattgagccgtgcaactacgaatctaagtcaagaatattgcagttgcacggaacatttgatcatacggaaggatatcgtaacggggaaaagacagcgcccaagacattagcttcttatcgtgaaaccatcatgacaagtagagaacttgaaattctacaagagttagaatttatgaacgaactagaaaaaaatacaaatcatagatatagagatatgggatacctttttacaacaaaaaacggtgttccaattcagactaactcattcaacttagctttaaaaaaagctaatgaaagattggaagacccaattacaaaaaaacttactagccacatcttccgtcacactcttattagccgtctagcagagaataacgtgccgctaaaatcaatcatggaacgtgtaggacatgcagacgctaaaactactgcccaaatttatactcatgtcacaaagaaaatgaaatcaagtgtagctgatattatggaaaactattaa

SEQ ID NO: 412 - protein, 380 aa, Streptococcus pyogenes
MWIEETDNGKFKFRENYKDPYTGTWKPVSVTMEKDNSRAYKAARKILEQKITEKIAQLKASELLFTELLDEWWAFYKKELKRSSVASLRGNIEEIRETFGIGVKVVNIDPKYVQNYLDNLDCSRNKKERNKSMLNLAFDYAVGLDIIQDNPARRAKLPRVKKTLEDWKKAEEKYLEEDEIKPLLKELYRRPSTYRLGLLAEFISLNGCRIGEAVSIEPCNYESKSRILQLHGTFDHTEGYRNGEKTAPKTLASYRETIMTSRELEILQELEFMNELEKNTNHRYRDMGYLFTTKNGVPIQTNSFNLALKKANERLEDPITKKLTSHIFRHTLISRLAENNVPLKSIMERVGHADAKTTAQIYTHVTKKMKSSVADIMENY

SEQ ID NO: 413 - DNA, 201 bp, Streptococcus pyogenes
gtgtcagatgaaaaatataatgcgaaattagatcaagctggtggcaagttaaaagaaggatttggtaagatttctggagataaatctttagaaactgaaggtaaagtagataaagttactggaaaagttaaagaggttattgcagacgccaaagatactgtaaaaggattagctaaaggcttagataataaagataaataa

SEQ ID NO: 414 - protein, 66 aa, Streptococcus pyogenes
MSDEKYNAKLDQAGGKLKEGFGKISGDKSLETEGKVDKVTGKVKEVIADAKDTVKGLAKGLDNKDK

SEQ ID NO: 415 - DNA, 249 bp, Streptococcus pyogenes
atggatgcagatttagcgcaaatggatgtcttagggctctattacgatgacaaccatttgagtttggtcaatacggtcaaggcgtatttaaaggaatttggcattggtgaatcccaaattgccttttcctacaaagacctcaattcaggcaggactgctgccatgaatgaccatcagccaatgattgcaggaagcacctataagctgccattaaacatgctggtggtagataaggcaaattatccatga

SEQ ID NO: 416 - protein, 82 aa, Streptococcus pyogenes
MDADLAQMDVLGLYYDDNHLSLVNTVKAYLKEFGIGESQIAFSYKDLNSGRTAAMNDHQPMIAGSTYKLPLNMLVVDKANYP

SEQ ID NO: 417 - DNA, 648 bp, Streptococcus pyogenes
atgacgcctaataaagaagattacttgaaatgtatttatgaaattggagaacaagaacccaagattacaaataaaatggttgcagaaaagatgcacgtttcggcacctgccgtttcagagatgattaaaaaaatgatttcacaaggctggattgtcaaagataaagcaaaaggctatttgctaaaagacaaaggctatgctcttgttgctaacctctaccgcaaactccgcttgattgaggtatttttgattcatcagctgggctataatacccaagaagtgcaccaagaagctgaagtcttagagcacactgtctcagactcctttatcgaccgtttagacaagatccttgattttccagatttctgcccacacggagggactattcctcgctatggtcagcctcttgtcgaaatgaacactacaactctcaacaccatcacggagttgggacggtttcgtctaagcagaatccacgaccactttgatttaatccagtatctagaagcacatcacctcaatatcaataccgagctaaccttaactcaaattgatacctttgcaaaaacctatacgatttgttatggcgacaaggaacttgtcatccctgaaaatattgctaagcaactttatgtcacagccctttaa

SEQ ID NO: 418 - protein, 215 aa, Streptococcus pyogenes
MTPNKEDYLKCIYEIGEQEPKITNKMVAEKMHVSAPAVSEMIKKMISQGWIVKDKAKGYLLKDKGYALVANLYRKLRLIEVFLIHQLGYNTQEVHQEAEVLEHTVSDSFIDRLDKILDFPDFCPHGGTIPRYGQPLVEMNTTTLNTITELGRFRLSRIHDHFDLIQYLEAHHLNINTELTLTQIDTFAKTYTICYGDKELVIPENIAKQLYVTAL

SEQ ID NO: 419 - DNA, 756 bp, Streptococcus pyogenes
atggtaacaaaggaagttgggcatgactttttagcacgtctaggaaaaaaacgcttaagacctggcggtgttgaggcgacaaactggttgattgaacaaggacaattctctcaggattgtcacgttttagaggttgcctgcaatcgctgcacgacagcaatagagttagctaaaaccttcggttgtcagattgatgccgttgacttaaaccccaaggttgtcaaagaagcacaagaaagggttgctgttgaggggttaacccgtcacattacagtatcccaagccagtgctttatcactaccatttccagataaccattttgatattgtgattaatgaagccatgttaaccatgttgaacgcccaagccaaggagaaggcactcaatgaatattggcgtgtgttaaaaccaggcgggcgacttttgacacatgacgtagcttatgaagatccaaaaacaagacaagtacttgacgagttacgtcaaacgattcatgtcaatgttgctcccttgtcactaacaggttggcaagccttatatcaagaacacggtttttctcaagtgacttatcaccatgggaaaatgtctttgatgacacctcgtggaatgattaaggatgaaggtcttatgaacaccctgaacattatgagacgaggccttaagaaagagaacagacaacagtttttaaagatgcgtcgtttttttaccagaacaggcaaaaatctctgctatattgctgtaaaaagtgtaaaataa

SEQ ID NO: 420 - protein, 251 aa, Streptococcus pyogenes
MVTKEVGHDFLARLGKKRLRPGGVEATNWLIEQGQFSQDCHVLEVACNRCTTAIELAKTFGCQIDAVDLNPKVVKEAQERVAVEGLTRHITVSQASALSLPFPDNHFDIVINEAMLTMLNAQAKEKALNEYWRVLKPGGRLLTHDVAYEDPKTRQVLDELRQTIHVNVAPLSLTGWQALYQEHGFSQVTYHHGKMSLMTPRGMIKDEGLMNTLNIMRRGLKKENRQQFLKMRRFFTRTGKNLCYIAVKSVK

SEQ ID NO: 421 - DNA, 429 bp, Streptococcus pyogenes
atggcaattattatcggtgctgacaaagcaggtcaagaacttaaagaagttatcaaagattaccttaaagaaggtaaatacgaagtcgttgatgttagtgaaaacgaagtacgtgactttgtagatacaactttagctgttgtaaaagaagttaatgcatccgatgataacttaggtattgtcattgatgcatatggtgttggttctttcatggtagctactaaaatcaaaggaatggtggcagctgaagtatcagatgagcgctcagcatacatgacaagaggacacaacaatgctcgaatcatcacgcttggttctgaaattagtgctccaggaattgcaaagaacattatcaaaggctttgtcgaaggtaaatatgatggtggacgtcatcaagttcgtgtcgacatgcttaataaaatgtgctaa

SEQ ID NO: 422 - protein, 142 aa, Streptococcus pyogenes
MAIIIGADKAGQELKEVIKDYLKEGKYEVVDVSENEVRDFVDTTLAVVKEVNASDDNLGIVIDAYGVGSFMVATKIKGMVAAEVSDERSAYMTRGHNNARIITLGSEISAPGIAKNIIKGFVEGKYDGGRHQVRVDMLNKMC

SEQ ID NO: 423 - DNA, 747 bp, Streptococcus pyogenes
atggcttccactattgcatttccggcaatggtcaaagaacttagacttagtaagaatttgaccatggaacagttggcagaagaagttggaaaaacaaagtcgacaatatcaaaatgggaaaaagggacgcgttctcctaaaatatatgagattgaagagatagcaaaattcttcggtgtagagcctaagaaaatgatgtttggagataatcccactcccaccgccccccaagttgaactcatcccatctaccctacaaaaaataaactctacttcttctcaattagaacacaagcgacaactaaacgtgcttgattatgccgaaacacaattagaacaacaaaacacagtagaagaaccacaagccacctactacacctacaattactacgaccacgcagcttcagctggtacaggtcagtatctaaatgatgtacaagtagaaacaattgaattaccagtcgattatgacgcagactttgttatccctgtttatggtgattccatggaaccgaagtatcactctggggattatgtatttgttaagctatccgtagagcttacagatggcgatataggcgtctttgaatactatggtgacgcttatatcaaacagctacttataaatgacaagggggcgtttttacacagtttaaatcaatgcggtgattatccagatataccgatagatagagatagcgactttaggattattggtgaagttatggggagttatagggagagatag

SEQ ID NO: 424 - protein, 248 aa, Streptococcus pyogenes
MASTIAFPAMVKELRLSKNLTMEQLAEEVGKTKSTISKWEKGTRSPKIYEIEEIAKFFGVEPKKMMFGDNPTPTAPQVELIPSTLQKINSTSSQLEHKRQLNVLDYAETQLEQQNTVEEPQATYYTYNYYDHAASAGTGQYLNDVQVETIELPVDYDADFVIPVYGDSMEPKYHSGDYVFVKLSVELTDGDIGVFEYYGDAYIKQLLINDKGAFLHSLNQCGDYPDIPIDRDSDFRIIGEVMGSYRER

SEQ ID NO: 425 - DNA, 474 bp, Streptococcus pyogenes
atgaataagaaagagacgcgtcaccaactcatacgttccctcatctctgagacaactatacatacacagcaagaattacaagaacggttgcaaaaaaatggcatcacgatcactcaggctaccctatcacgtgacatgaaggaattgaacctggtcaaagtaacttctggaaacgacacacactatgaagcgttagccatttcacaaacccgctgggaacatcgtcttcgtttttacatggaagacgctttggtcatgttaaagatagttcaacatcaaattattttaaaaacgttacctggactagcccaatcctttggctccattttagatgccatgcaaattccagaaattgtagcaacggtctgtggtgatgatacttgcttgattgtctgtgaagacaatgagcaagctaaggcctgttacgaaacccttagtcattacacgccaccattcttctttagtaacaaataa

SEQ ID NO: 426 - protein, 157 aa, Streptococcus pyogenes
MNKKETRHQLIRSLISETTIHTQQELQERLQKNGITITQATLSRDMKELNLVKVTSGNDTHYEALAISQTRWEHRLRFYMEDALVMLKIVQHQIILKTLPGLAQSFGSILDAMQIPEIVATVCGDDTCLIVCEDNEQAKACYETLSHYTPPFFFSNK

SEQ ID NO: 427 - DNA, 780 bp, Streptococcus pyogenes
atgaaattaaccaccttagggtcttggggagcctatccctatcaagatgcaggcacaacctcttatttggtcacaggacatgacggctttcagttattgatggatgctggtagtcgagcgctcaatgagctggaaaaagaaatcagtcctctcgatttggatgcagtgattattagccattaccatccagaccacgtggccgatttaggcgtgttgcgccattattttcaactttatcctaaacacctgtggcagcctaaagtattgcccatttatgggcatgatgaggaccgaaacgaatttgctaagttaagcattcctgatgtttcagaaggtagagcctatgatgttactggagttgaacagattggttcttttgacattacctttcttaaaacagttcatccagttgtgtgttatgcctttcgaattgtagaaagagcgactggtcaggtacttgtctttactggagacagtggttattttgaaggattggcagacttcgcaaaagaagcagaccttttcttagcggatgtttacttatacgaaggcaatgaaaatcatatggcccatttgaccagtaaggaagcaggactaatggctagccaggcaggtgttaagaagcttgtcttgacccacatgccaccggttcctccagatggtattaattccaaaaaccatttagaagtgttgaggcaagaaacacaggcctatgcaggtaatattcctgttgaccttgccttaccacacaaatcttggaacttggggagtctttcttga

SEQ ID NO: 428 - protein, 259 aa, Streptococcus pyogenes
MKLTTLGSWGAYPYQDAGTTSYLVTGHDGFQLLMDAGSRALNELEKEISPLDLDAVIISHYHPDHVADLGVLRHYFQLYPKHLWQPKVLPIYGHDEDRNEFAKLSIPDVSEGRAYDVTGVEQIGSFDITFLKTVHPVVCYAFRIVERATGQVLVFTGDSGYFEGLADFAKEADLFLADVYLYEGNENHMAHLTSKEAGLMASQAGVKKLVLTHMPPVPPDGINSKNHLEVLRQETQAYAGNIPVDLALPHKSWNLGSLS

SEQ ID NO: 429 - DNA, 357 bp, Streptococcus pyogenes
atgaaaagagatgatcttatgcaaattattaagcgtgatggccacgttgctgattttgatccagataaaatttatcaagcaattattaaagcagcaaggacggtctatgttattgatgacacgtggcgacaaaacttaacacatgtcactaaaaaagtagttattgatttagaagaagcacatgtagaacgtcctactatcaatatggtccaatcccttgtggagaatcgtttgatggatgctggatatattaccattgcagaacattacatttcttatcgtcttcagcgagatttagagcgcaatggctatggtgataagattgtggttcacttgcgttttgaacaaataaaataa

SEQ ID NO: 430 - protein, 118 aa, Streptococcus pyogenes
MKRDDLMQIIKRDGHVADFDPDKIYQAIIKAARTVYVIDDTWRQNLTHVTKKVVIDLEEAHVERPTINMVQSLVENRLMDAGYITIAEHYISYRLQRDLERNGYGDKIVVHLRFEQIK

SEQ ID NO: 431 - DNA, 336 bp, Streptococcus pyogenes
atgtcattaccaaattgtttgcaatgccagtctgaatatgtttacgaagatggtcttttattaatctgtccaatgtgtgcttttgaatggacaccaggcgaagaagcgactgaagaagaaggacttgttgttttggatagcaatggtgtccgactgtctgatggtgataccattactgtggttaaagatttgaaagtaaaaggcgctccaaaagacctgaaacaagggactcgagttaaaaatattcgcctggtggaaggtgatcataatattgattgtaagattgatgggtttggcgcgatgaaattgaaatcagaatttgtcaagaaaatctaa

SEQ ID NO: 432 - protein, 111 aa, Streptococcus pyogenes
MSLPNCLQCQSEYVYEDGLLLICPMCAFEWTPGEEATEEEGLVVLDSNGVRLSDGDTITVVKDLKVKGAPKDLKQGTRVKNIRLVEGDHNIDCKIDGFGAMKLKSEFVKKI

SEQ ID NO: 433 - DNA, 1206 bp, Streptococcus pyogenes
atgacctttttagataaaattaaacaaggctgtttagatggctggacaacgtacaaaatcttgccatccttgaccgcagcgcagacaatcttagaaagcgggtggggcaaacatgccccacacaacgctctgtttggtattaaggcagatagctcttggactggtaaatcatttgataccaaaacccaagaggaatatcaagcaggtgttgtcacggatattgtggaccgatttagggcgtatgatagttggactgacagcattattgatcacggtaaatttttaaacgataatccacggtatcaggctgtgattggtgagactgattacaaaaaagcttgtcacgctataaaagatgcaggttatgccacagctagcggttatgcagagttgcttatccaactaatcgaggaaaatgaccttcaggaatgggatgaagaggctattgtcagaaaggagaagcaaatgattagttctcaatgtcgagaagtcattgaattttttattaacttggtaaatgctggggttggcgtggataaagatggttttgcgggctggcaatgcacagatgtgccttgttatgcagcaaagcactggtttggtgttgatctttggggaaatgcgattgacttactagatagcgctgctgccgtaggttgggaagtccaccgcatgccgacagatgcaaatccacagactggagcattttttgtccaatcagtgccatatcatcaatttggtcacacaggagttgtcattgaggatagcgacggttataccatgcgaactatcgagcaaaacattgatggcaatcctgatgctttgtatgtcggtgcaccagctcgttttaatactcgtgattttaccggcgtgacaggatggttttaccctccttaccaaggagatattgtcacgcaaccagtcagcaccgagccacaaacgtctgacactatcgtagagacagcaaaaacaggtacttttacgcttgatgtcgcagaaatcaatatcagacgttggccaagtttaactagcgaggtagtaggtagctataaacaaggtgatactatcagctttgatagtgagggttacgccaatggttactactggattagctacgttggcggctcgggtatgcgaaactacacggctattgggataactgacaaagacggtaacattatcagcctttggggcaaattaaattag

SEQ ID NO: 434 - protein, 401 aa, Streptococcus pyogenes
MTFLDKIKQGCLDGWTTYKILPSLTAAQTILESGWGKHAPHNALFGIKADSSWTGKSFDTKTQEEYQAGVVTDIVDRFRAYDSWTDSIIDHGKFLNDNPRYQAVIGETDYKKACHAIKDAGYATASGYAELLIQLIEENDLQEWDEEAIVRKEKQMISSQCREVIEFFINLVNAGVGVDKDGFAGWQCTDVPCYAAKHWFGVDLWGNAIDLLDSAAAVGWEVHRMPTDANPQTGAFFVQSVPYHQFGHTGVVIEDSDGYTMRTIEQNIDGNPDALYVGAPARFNTRDFTGVTGWFYPPYQGDIVTQPVSTEPQTSDTIVETAKTGTFTLDVAEINIRRWPSLTSEVVGSYKQGDTISFDSEGYANGYYWISYVGGSGMRNYTAIGITDKDGNIISLWGKLN

SEQ ID NO: 435 - DNA, 414 bp, Streptococcus pyogenes
atgcctacaattaaccagttggtacgtaaaccacgtaaatctaaaattgaaaaatcagattcaccagctttgaacattggttacaacagtcacaaaaaagttcaaactaaaatggctgccccacaaaaacgtggcgttgctactcgtgttggaacaatgacacctaaaaaacctaactcagcccttcgtaaattcgctcgtgtacgtttgagcaaccttatcgaagtaactgcctacatcccaggtatcggacacaacttgcaagagcacagcgttgttcttatccgtggcggacgtgtaaaagaccttccaggggtacgttaccatatcgttcgtggcgcacttgatactgcaggtgttgctgaccgtaaacaaggccgttctaaatacggtgcgaaacgtccaaaaggataa

SEQ ID NO: 436 - protein, 137 aa, Streptococcus pyogenes
MPTINQLVRKPRKSKIEKSDSPALNIGYNSHKKVQTKMAAPQKRGVATRVGTMTPKKPNSALRKFARVRLSNLIEVTAYIPGIGHNLQEHSVVLIRGGRVKDLPGVRYHIVRGALDTAGVADRKQGRSKYGAKRPKG

SEQ ID NO: 437 - DNA, 807 bp, Streptococcus pyogenes
atgctacttgaaatccttgatttatcacgctccacctattactatcaagtgaagcgactagctcaaggagataaggatatagaactaaagcatgtgattcgagagatttatgatgagcataaaggtaattacggttatcgtcgtattcatatggagttgcgtaaccgaggatttgtggtcaatcataaaaaagttcaacgtctcatgaaagtcatgggcctagcagcccgcattcgtcggaagcgcaagtattcttcttacaaaggagaggttggtaagaaggctgataatctgattaaacgtcacttcgaaggctctaaaccttacgaaaaatgttacactgatgtgacggagtttgccctacctgaagggaagctttatctatcgccagtttttgatagctataactgtgagattattgatttcactctgtctcggtctcctaacttgaaacaggctcaaaccatgcttgagaagacttttccagcggattcatacagcggaactattcttcatagtgaccaggggtggcaataccaacaccagtcctaccatgattttttagagtctaaaggtattctgccatccatgtcccgcaaagggaatagcccggataacggcatgatggattccttctttggcattctcaaatctgaaatgttttatggactcgagacaacttatcaatcacttgacaagcttgaagaagctattacagattacattttttactacaacaacaaacgaattaaagcaaaactaaaaggacttagtcctgtccaatacagaactaaatcctttcaataa

SEQ ID NO: 438 - protein, 268 aa, Streptococcus pyogenes
MLLEILDLSRSTYYYQVKRLAQGDKDIELKHVIREIYDEHKGNYGYRRIHMELRNRGFVVNHKKVQRLMKVMGLAARIRRKRKYSSYKGEVGKKADNLIKRHFEGSKPYEKCYTDVTEFALPEGKLYLSPVFDSYNCEIIDFTLSRSPNLKQAQTMLEKTFPADSYSGTILHSDQGWQYQHQSYHDFLESKGILPSMSRKGNSPDNGMMDSFFGILKSEMFYGLETTYQSLDKLEEAITDYIFYYNNKRIKAKLKGLSPVQYRTKSFQ

SEQ ID NO: 439 - DNA, 135 bp, Streptococcus pyogenes
gtgaaacgtacttatcaaccaagtaaaatccgtcgtcaacgtaaacacggattccgtcaccgtatgtcaactaaaaacggacgtcgcgtgcttgctgcacgtcgtcgtaaaggacgtaaagtattatcagcttaa

SEQ ID NO: 440 - protein, 44 aa, Streptococcus pyogenes
MKRTYQPSKIRRQRKHGFRHRMSTKNGRRVLAARRRKGRKVLSA

SEQ ID NO: 441 - DNA, 147 bp, Streptococcus pyogenes
ttgttaatcattgtttgggcaagtccttttgacttgtccttttcgatgaactgtttaaacgccaatgagcacaaactggatgaaccgtatgttgtggagttcttagagaccagatataaggtgttggtgttggatcagttgaggtga

SEQ ID NO: 442 - protein, 48 aa, Streptococcus pyogenes
MLIIVWASPFDLSFSMNCLNANEHKLDEPYVVEFLETRYKVLVLDQLR

SEQ ID NO: 443 - DNA, 180 bp, Streptococcus pyogenes
ttgcataaaattgagctgggttgctacgactacaacaagcaaagtcaggcagtggctcgcaaattaggctttaccttagaagccaatgcccgtgaccgtaaggacgttcaaggtcgccgctgtggcgacatgcgttttgggttactgagaagtgagtgggaggagcagaaacaaaaatga

SEQ ID NO: 444 - protein, 59 aa, Streptococcus pyogenes
MHKIELGCYDYNKQSQAVARKLGFTLEANARDRKDVQGRRCGDMRFGLLRSEWEEQKQK

SEQ ID NO: 445 - DNA, 186 bp, Streptococcus pyogenes
ttggctaaaaaatctatgattgctaagaacaaacgtcctgcaaaacactctacacaagcttatactcgctgtgaaaaatgtggacgtccacattcagtttaccgcaagtttaaactttgtcgtgtttgcttccgtgaattggcttacaaaggtcaaattccaggtgttgtcaaagcttcttggtaa

SEQ ID NO: 446 - protein, 61 aa, Streptococcus pyogenes
MAKKSMIAKNKRPAKHSTQAYTRCEKCGRPHSVYRKFKLCRVCFRELAYKGQIPGVVKASW

SEQ ID NO: 447 - DNA, 186 bp, Streptococcus pyogenes
ttgagttttgagatatttacactgataatcgggtggaaactggtcgggtatcgggtaatggagtgtggttcttcgtttaagcaaggagattatcgtttggtggttcatatttgcttgttaaatgttagggatgagatgctgagtcagcaaggccatgaagataaagctgactggctagagccttga

SEQ ID NO: 448 - protein, 61 aa, Streptococcus pyogenes
MSFEIFTLIIGWKLVGYRVMECGSSFKQGDYRLVVHICLLNVRDEMLSQQGHEDKADWLEP

SEQ ID NO: 449 - DNA, 192 bp, Streptococcus pyogenes
ttgcaacaagatacaagtgaacgtggacaccaagctcattttgtcatgcagagccatcaacagcgaagacgtcaacaccaactctgtctagcaccttttcaaaagaattgtgagtttctgtattacgagatagagaaggtaaaactggattctgaagactgccttaccatcaatcctttgggaatggtttaa

SEQ ID NO: 450 - protein, 63 aa, Streptococcus pyogenes
MQQDTSERGHQAHFVMQSHQQRRRQHQLCLAPFQKNCEFLYYEIEKVKLDSEDCLTINPLGMV

SEQ ID NO: 451 - DNA, 216 bp, Streptococcus pyogenes
ttgatagttgctgatagcaataagttaaagtattttgtctctgaaaaaaaggcggtcggtctttcacaggctgcctttttgtatgtcatgttagtgaccgcctataaaaagaccatcatctatgctaaaataagactgacaggtattgctttagaaccttcaggagtttctgacgggtatttaatgaactatcacgtttgtctacactattattag

SEQ ID NO: 452 - protein, 71 aa, Streptococcus pyogenes
MIVADSNKLKYFVSEKKAVGLSQAAFLYVMLVTAYKKTIIYAKIRLTGIALEPSGVSDGYLMNYHVCLHYY

SEQ ID NO: 453 - DNA, 234 bp, Streptococcus pyogenes
ttggcaaatattaaatcagctattaaacgcgctgaacttaacgttaaagcaaacgaaaaaaactcagcacaaaaatcagctatgcgtactgctatcaaagcatttgaagctaacccatctgaagagcttttccgcgctgcttcttcaagcatcgataaagctgaatcaaaaggtttgattcacaaaaacaaagcaagccgcgataaagcacgccttgctgcaaaacttggctaa

SEQ ID NO: 454 - protein, 77 aa, Streptococcus pyogenes
MANIKSAIKRAELNVKANEKNSAQKSAMRTAIKAFEANPSEELFRAASSSIDKAESKGLIHKNKASRDKARLAAKLG

SEQ ID NO: 455 - DNA, 234 bp, Streptococcus pyogenes
ttggaattctatgctttatttttgagcctagggtctcaaaaattccgcgtaacgtcactgccagtattgacaccacttttgccacagcaaaaagcagctgttttggctcacgtcacacgcagaaataagaaatcagttgtcaaatcagcagagcagttcatgctttttgagcatcaaactgggtttgtctccattctaagattgaagaaagagtactttcttcaatctttttag

SEQ ID NO: 456 - protein, 77 aa, Streptococcus pyogenes
MEFYALFLSLGSQKFRVTSLPVLTPLLPQQKAAVLAHVTRRNKKSVVKSAEQFMLFEHQTGFVSILRLKKEYFLQSF

SEQ ID NO: 457 - DNA, 228 bp, Streptococcus pyogenes
gtgttaagaaagaagaaaactaccattgtagggattattttaggaatgatgatagtgaccttacttgtcggctgtttgactggtaaaaagaaaggctttcctcctaaagcaggtgagcggcagcaaacggctgacttaaaaatgaaaaaaagattagaaaaactgttcaaaaaccgttacctgaaaaatctaaagaggctaagcaagctgttatggatgcagatttag

SEQ ID NO: 458 - protein, 75 aa, Streptococcus pyogenes
MLRKKKTTIVGIILGMMIVTLLVGCLTGKKKGFPPKAGERQQTADLKMKKRLEKLFKNRYLKNLKRLSKLLWMQI

SEQ ID NO: 459 - DNA, 252 bp, Streptococcus pyogenes
gtgcgtaaagcggataagttagacactgaaaaattggctcagtctcaatttattctagttagaaaaccaacttacgttcaggaagaagtttatcagctgctacgtgacttgagtcgcttctatcaaaacttgactgaggataatattgttcgagagttaagaatcgccttcacaagatcttacaagtcacttttcctgaactggaacacatcttatttgcaccaactggtgagtaatactggaatgtggtaa

SEQ ID NO: 460 - protein, 83 aa, Streptococcus pyogenes
MRKADKLDTEKLAQSQFILVRKPTYVQEEVYQLLRDLSRFYQNLTEDNIVRELRIAFTRSYKSLFLNWNTSYLHQLVSNTGMW

SEQ ID NO: 461 - DNA, 261 bp, Streptococcus pyogenes
ttggtccagatccagaaaacgcaatatattaagcacctagagcaatctggtgcttttcttatgcccaaaaaggagaaaaatatgaataaaatatcattaaatgtcgaaatgacttgggaaaacaaagacgaatttcaacaaatcatgaataaagtcaatgaaacaaaagaagcttacgaaaaagccttagaagctgcggaaaattttgtccctaaaatgtcgtgtgcaacaaagttaaataaaggagaaggcgatgaataa

SEQ ID NO: 462 - protein, 86 aa, Streptococcus pyogenes
MVQIQKTQYIKHLEQSGAFLMPKKEKNMNKISLNVEMTWENKDEFQQIMNKVNETKEAYEKALEAAENFVPKMSCATKLNKGEGDE

SEQ ID NO: 463 - DNA, 273 bp, Streptococcus pyogenes
ttgcccttacccacgttttatctcgttacttttcttcatagtacagtatttttttgttataataaagctatgactattcgacaatttctttttatggcctttgtatgtgcctttgaaacctatttttttaatgacctgttactctctggaaattatctcttcgccttattttggggcttgttgctctttagggatttaagaagagtgcataccattaaccaactgactaaaaccattttaaaaacggctaattctcccaagaagaaagactga

SEQ ID NO: 464 - protein, 90 aa, Streptococcus pyogenes
MPLPTFYLVTFLHSTVFFCYNKAMTIRQFLFMAFVCAFETYFFNDLLLSGNYLFALFWGLLLFRDLRRVHTINQLTKTILKTANSPKKKD

SEQ ID NO: 465 - DNA, 273 bp, Streptococcus pyogenes
gtggaaactaaattctataaacagcgaaaaaatcgcttggttgcaggtgttattgctggtttagcagataagtatggttgggatcttgctctagcgcgtgtcttagcggctcttcttatttacggaactggttttggagttttgctttatattttgttggccatcttcttaccttacaaggaagacttgcttgaagaacgttatggccgaggtcctcgtcgtcgtaaagacgctgatgtcttaaatgaagaagaagatggttggttctggtaa

SEQ ID NO: 466 - protein, 90 aa, Streptococcus pyogenes
METKFYKQRKNRLVAGVIAGLADKYGWDLALARVLAALLIYGTGFGVLLYILLAIFLPYKEDLLEERYGRGPRRRKDADVLNEEEDGWFW

SEQ ID NO: 467 - DNA, 270 bp, Streptococcus pyogenes
gtgaataaacgaatcaagaaaaaacataaattggaaacagcagttgtgttgcttatcgcagaaaatgctatgcaggctgaagctattaagaatcaaaacagacaaattgcagagctgagatcgattatacaacaaaacgcccaagcaataaatagagagtttgcagcagttaaaggtgtgtgtcttgataatcaagcagctattacaaacattgcagttgatattaactacgtcaagaaaaactacaaacggaagtgggggaagaaatag

SEQ ID NO: 468 - protein, 89 aa, Streptococcus pyogenes
MNKRIKKKHKLETAVVLLIAENAMQAEAIKNQNRQIAELRSIIQQNAQAINREFAAVKGVCLDNQAAITNIAVDINYVKKNYKRKWGKK

SEQ ID NO: 469 - DNA, 279 bp, Streptococcus pyogenes
ttggcacttgatgttgtaaccaaaactgacaagacacctcttttaggtagaattttatcaaagtatgtaggacgcttgacgtcgtgtattgaaaatgaaaccactaaaataaggaatcattcaagacaaaacgataccatcggcctcaatcatcttcttggaaacttgaaaaccgtccataaccctgagattatccttaaaacgattaatgtctattctcgtcgtcttcaggttttttcgcagataatggctacgcttatactcggtttaatcctttag

SEQ ID NO: 470 - protein, 92 aa, Streptococcus pyogenes
MALDVVTKTDKTPLLGRILSKYVGRLTSCIENETTKIRNHSRQNDTIGLNHLLGNLKTVHNPEIILKTINVYSRRLQVFSQIMATLILGLIL

SEQ ID NO: 471 - DNA, 270 bp, Streptococcus pyogenes
ttgacacaaaatgtttgccaacaaaacattacctataccgtcaaagagcgctttgcttcctatacccttgaagcgcaagccaaccaagaggttcatctaaaccttacattattagcaaaccgttttggaacaagcgatcgccatcttaagcacgtacttaagcagcccatttttcagaggattatcgaacgcatctgcttcaaaacctatcgtattgccgatttagacgctctaactcaattaagacctctgaggtatgcagcccattaa

SEQ ID NO: 472 - protein, 89 aa, Streptococcus pyogenes
MTQNVCQQNITYTVKERFASYTLEAQANQEVHLNLTLLANRFGTSDRHLKHVLKQPIFQRIIERICFKTYRIADLDALTQLRPLRYAAH

SEQ ID NO: 473 - DNA, 309 bp, Streptococcus pyogenes
ttgtatgtgtttatagagcccaatgatctaaaagactatttgataacggtttatgatgagcgtaatcgtgcgattcgaaaacagacacaagtttactgcttttacctgatgattgttctatttgttgccttattctttttcttcccttgcttaaccattcgagatcttgtttcttataagctacctttgatttttgcttacctttacttgattatcagaagtctggtggctaagaaaatggaggcactagggaaaataacaactaatagtcaaaaacctccgtttgatacgagtcaggttctttgttag

SEQ ID NO: 474 - protein, 102 aa, Streptococcus pyogenes
MYVFIEPNDLKDYLITVYDERNRAIRKQTQVYCFYLMIVLFVALFFFFPCLTIRDLVSYKLPLIFAYLYLIIRSLVAKKMEALGKITTNSQKPPFDTSQVLC

SEQ ID NO: 475 - DNA, 300 bp, Streptococcus pyogenes
ttgttcctcacctgggaaaatctctttcttacaaatcaatcgcgtcgtcgcttgaaactattagtggttgagagaagttataacaatgttggcaacttcttaaaagagtattttggaggattttttgagattgtcaactttgatgacttgaggctgaccatggttgatatggtgtcactgtcttcagagtatgacgtaattgtgacagatatgattcttgagcaaacaacggactccgaaattttatttttcaatcagatggcccctagtgtggtggcgaatagattgacagacatgtaa

SEQ ID NO: 476 - protein, 99 aa, Streptococcus pyogenes
MFLTWENLFLTNQSRRRLKLLVVERSYNNVGNFLKEYFGGFFEIVNFDDLRLTMVDMVSLSSEYDVIVTDMILEQTTDSEILFFNQMAPSVVANRLTDM

SEQ ID NO: 477 - DNA, 303 bp, Streptococcus pyogenes
ttgactaatttagaaagattatctagtcttattggtccagctcaacgggctggaaaagtgatttcaggtgaagaactagtagtaaaagctattcaacaccagcaggtaatattagtatttttagccaatgatgctggtcctaatgtgacaaaaaaagtgacagataaaagtaattattataatgtagaagtctccacagtgttgaatgcactggaattaagtgctgcactaggtaaaccaaggaaggttgctgccattgcagatgctggattttcaaagaaaatgaggactcttatggaatag

SEQ ID NO: 478 - protein, 100 aa, Streptococcus pyogenes
MTNLERLSSLIGPAQRAGKVISGEELVVKAIQHQQVILVFLANDAGPNVTKKVTDKSNYYNVEVSTVLNALELSAALGKPRKVAAIADAGFSKKMRTLME

SEQ ID NO: 479 - DNA, 318 bp, Streptococcus pyogenes
ttgattgttagaaatggtaagaattttttaactagagatgcagatgaccaatattacaccattggtggtacaagtttggtaggtgaaaaaacgcatgaaactgttttacgtgaaaccttagaggaagttggtattcgagctaaggttaatcaactggcttttatggttgagaatcattttgatatcgatgatgttttctggcataatattgaatttcattatttggtaagccccttagaagaccctaaactagaaatgatagagaatgcaagcgacaggtttgtgaatggattccaatcaatcaactggatcaaatga

SEQ ID NO: 480 - protein, 105 aa, Streptococcus pyogenes
MIVRNGKNFLTRDADDQYYTIGGTSLVGEKTHETVLRETLEEVGIRAKVNQLAFMVENHFDIDDVFWHNIEFHYLVSPLEDPKLEMIENASDRFVNGFQSINWIK

SEQ ID NO: 481 - DNA, 324 bp, Streptococcus pyogenes
gtgaataaaaaagaattattcgatgcttttgatggattttcccaaaatttaatggttactttagctgaaattgaagccatgaaaaaacaagtccaatcactagtagaagaaaacacgattcttcgcctagaaaatacaaaactacgggaacgtttgagtcacctagaacatgaaacggtagctaaaaatccttccaaacaaaggaaggatcacttagagggaatttatgatgaagggtttcatatctgcaattttttctatggacaacgtcgtgaaaatgatgaagaatgtatgttttgcagagaattattagatagaaagtaa

SEQ ID NO: 482 - protein, 107 aa, Streptococcus pyogenes
MNKKELFDAFDGFSQNLMVTLAEIEAMKKQVQSLVEENTILRLENTKLRERLSHLEHETVAKNPSKQRKDHLEGIYDEGFHICNFFYGQRRENDEECMFCRELLDRK

SEQ ID NO: 483 - DNA, 339 bp, Streptococcus pyogenes
ttgaccgtctctagttcagcatggatgccaaggcttatctcccaacagattctatcagagtatgtgaagagcctagaagttgaagctgataaggtcgttattccaggacagaatactccagtctttagttgggatagggatgggaatgggaatctttccattgacacaccgctcctaaaggtgagaggggaaagtctagcgacacaagctgaccttacaaccatctctttaactcctggtccaaagggagaactctggcagacaagtgttgaaaggttggatataaaagtagacaagcacatcagcctaaccttcaaaaatggcgtacggattgattga

SEQ ID NO: 484 - protein, 112 aa, Streptococcus pyogenes
MTVSSSAWMPRLISQQILSEYVKSLEVEADKVVIPGQNTPVFSWDRDGNGNLSIDTPLLKVRGESLATQADLTTISLTPGPKGELWQTSVERLDIKVDKHISLTFKNGVRID

SEQ ID NO: 485 - DNA, 330 bp, Streptococcus pyogenes
ttgaaagggataacagttgctttagccgataagtcgattagcggaaaagacccttttggaaatcctgtaacagttgattttgatatcaaaattgagaatgtgcttgttgcaccagcaactaccgaagatatcactaatcagttatctttgaccggaaaaaaggttgaatatgtcttggctataccaaaaggagacgaacacgattgggaaaataaggaagttagatttttcggcaaaaaatggcgcacagtaggaattccactagaaggtattgaagagcttataccactagactggaataagaaagttatggtggaaagatatgagtaa

SEQ ID NO: 486 - protein, 109 aa, Streptococcus pyogenes
MKGITVALADKSISGKDPFGNPVTVDFDIKIENVLVAPATTEDITNQLSLTGKKVEYVLAIPKGDEHDWENKEVRFFGKKWRTVGIPLEGIEELIPLDWNKKVMVERYE

SEQ ID NO: 487 - DNA, 336 bp, Streptococcus pyogenes
ttggactataagaaatatcagattatctatgctcctgatgttttagagaagctaaaagaaattcgtgattatatttctcaaaactattcctcaacatcaggtcagcgtaaaatggagcaaatcattagcgacatagaaaaactcgaggttttcccagaagttggttttgatgccgatgaaaaatatggttcaaaaatcatccattatcacagcactaaaggttataccttaagtaaagattatattgtcctataccatatcgagggggaagaaaataggatcgttattgattacttgcttcctactcaaagcgactatataaagttattcaaataa

SEQ ID NO: 488 - protein, 111 aa, Streptococcus pyogenes
MDYKKYQIIYAPDVLEKLKEIRDYISQNYSSTSGQRKMEQIISDIEKLEVFPEVGFDADEKYGSKIIHYHSTKGYTLSKDYIVLYHIEGEENRIVIDYLLPTQSDYIKLFK

SEQ ID NO: 489 - DNA, 357 bp, Streptococcus pyogenes
gtgatttcgaaaccagataaaaacaaaatccgccaaaaacgccaccgtcgcgtccgcggtaaactctctggaactgctgatcgcccacgtttgaacgtattccgttctaatacaggcatctacgctcaagttattgatgacgtagcgggtgtaacgctcgcaagtgcatcaactcttgataaagacgtttctaaaggaacaaaaacagaacaagccgttgtagtcggcaaacttgttgctgaacgtgcagtggctaaaggtatttctgaagtggtgtttgaccgcggtggatatctctatcacggacgtgttaaagccttggctgatgcagctcgtgaaaacggattgaaattctaa

SEQ ID NO: 490 - protein, 118 aa, Streptococcus pyogenes
MISKPDKNKIRQKRHRRVRGKLSGTADRPRLNVFRSNTGIYAQVIDDVAGVTLASASTLDKDVSKGTKTEQAVVVGKLVAERAVAKGISEVVFDRGGYLYHGRVKALADAARENGLKF

SEQ ID NO: 491 - DNA, 384 bp, Streptococcus pyogenes
ttggctaaaccaacacgtaaacgtcgtgtgaaaaaggacatcgaatctggtgttgcacacattcacgctacatttaataacactattgttatgattacagatgtgcatggtaatgctcttgcatggtcatcagctggtgctcttggtttcaaaggttctcgtaaatctactccatttgctgctcaaatggctgcagaagctgctgcaaaatctgcacaagaacacggactaaaaactgttgaagtgactgtaaaaggtcctggttcaggtcgtgaatcagctattcgtgctctagcagctgcaggtcttgaagtaactgcaattcgtgatgtgacccctgtgccacataatggtgctcgtcctccaaaacgtcgtcgtgtataa

SEQ ID NO: 492 - protein, 127 aa, Streptococcus pyogenes
MAKPTRKRRVKKDIESGVAHIHATFNNTIVMITDVHGNALAWSSAGALGFKGSRKSTPFAAQMAAEAAAKSAQEHGLKTVEVTVKGPGSGRESAIRALAAAGLEVTAIRDVTPVPHNGARPPKRRRV

SEQ ID NO: 493 - DNA, 360 bp, Streptococcus pyogenes
ttgaagaagacctatcgtgtcaagcgtgagaaagatttccaagccatatttaaggatggaaaaagtacagcaaatcgaaaatttgtcatttatcatttaaatagaggccaagaccacttccgtgtgggtatttctgtcggtaaaaaaataggaaatgcagtcaccagaaatgcagtcaaacgaaagatacgtcatgttatcatggcattagggcatcagctgaagtcagaggatttcgtggtgattgcccgtaagggtgtccactctttggagtatcaagagcttcaacaaaatttacatcatgttttaaagttagcacaattgcttgagaaaggttttgagagtgaagaaaaacattaa

SEQ ID NO: 494 - protein, 119 aa, Streptococcus pyogenes
MKKTYRVKREKDFQAIFKDGKSTANRKFVIYHLNRGQDHFRVGISVGKKIGNAVTRNAVKRKIRHVIMALGHQLKSEDFVVIARKGVHSLEYQELQQNLHHVLKLAQLLEKGFESEEKH

SEQ ID NO: 495 - DNA, 387 bp, Streptococcus pyogenes
gtgaacaaaagatttaaaacaggatttctagcgcttgttgctatgctacttgttgcttgctcgcaaggaacaaaacaaatacagacgactccaagcgttccaaaagcagaccatcacgttcgcttagttgtcaaagaagataccaatactgttgacgaaaaagtttcttttggaaaaggagatacggtgcttgaggttctcaaagataattatgaggttaaagaaaaagatggttttatcacagcaattgatggtatcgagcaagacacgaaagctaacaaatactggctttttaaggtgaatggaaagatggcagataagggtgccgatcaaattaccgttaaagatggtgatagcattgaattttatcaagaagtttttaattag

SEQ ID NO: 496 - protein, 128 aa, Streptococcus pyogenes
MNKRFKTGFLALVAMLLVACSQGTKQIQTTPSVPKADHHVRLVVKEDTNTVDEKVSFGKGDTVLEVLKDNYEVKEKDGFITAIDGIEQDTKANKYWLFKVNGKMADKGADQITVKDGDSIEFYQEVFN

SEQ ID NO: 497 - DNA, 369 bp, Streptococcus pyogenes
gtgttaaattcagcccctagtgagactgaaaagagtgaaactgaaggtagtgaaactaaagagagtaatttagtgattgaggacgaggaggaaagaaaggagtgcactagtgtgaaaaagactgagggtcactttacccgtcaagttgatcaggtcaccaaatatgacaaagattatatttggagtttggttcattcccaattacgtgaaggtggtttatcacaagctgctagtgacttagtcatgagctattttgaagaacgctatgcttatgcgctggaacacatacggttcgcaagaacagctgaagctattgcggaatatgtctttaatggtgtcttatccgaatggaccaagcaactaaggtga

SEQ ID NO: 498 - protein, 122 aa, Streptococcus pyogenes
MLNSAPSETEKSETEGSETKESNLVIEDEEERKECTSVKKTEGHFTRQVDQVTKYDKDYIWSLVHSQLREGGLSQAASDLVMSYFEERYAYALEHIRFARTAEAIAEYVFNGVLSEWTKQLR

SEQ ID NO: 499 - DNA, 357 bp, Streptococcus pyogenes
ttggcccctgtaacaggttttatttataattatgtaggcatcattattggcagtatagccctcttcttgctcgttaagacttatggtcgtaaatttatcttactctttgtaaatgacaaaacattttacaagtatgaaaggcgtttggagacaccaggatatgaaaaattatttattttttgtatggcatcgcctgtttctccagctgatattatggttatgattacgggattgacggacatgtctttaaagcgctttgtaactattcttttaataactaaaccaatttctattatcggctacagttatttatttatttttggaaaagatgttatatcttggttcttacagcattaa

SEQ ID NO: 500 - protein, 118 aa, Streptococcus pyogenes
MAPVTGFIYNYVGIIIGSIALFLLVKTYGRKFILLFVNDKTFYKYERRLETPGYEKLFIFCMASPVSPADIMVMITGLTDMSLKRFVTILLITKPISIIGYSYLFIFGKDVISWFLQH

SEQ ID NO: 501 - DNA, 357 bp, Streptococcus pyogenes
ttgaaaaagaaatgcttaatttgcaaaaaaaacttccaagcaaaaaccaatagaactttatattgctctgaagaatgccgtaagaaaggcaatcgtgagaaacaacgtaaattgatgaaacaaaaacgggctgaacagaggaaagaaaaaaagaaagtcctaaatcctaacacagatgtgacagaaaagcctaaaaaaatacgtaatttagcgcagcactataaaaaactaaaaaaggaaattttggcaaatgaatctgaatttggttttactggaataacacttattgaaggaatagatgtacatgaagaaaactttgtagatttagtcatgcaaaaaataaaggagcagaaatga

SEQ ID NO: 502 - protein, 118 aa, Streptococcus pyogenes
MKKKCLICKKNFQAKTNRTLYCSEECRKKGNREKQRKLMKQKRAEQRKEKKKVLNPNTDVTEKPKKIRNLAQHYKKLKKEILANESEFGFTGITLIEGIDVHEENFVDLVMQKIKEQK

SEQ ID NO: 503 - DNA, 396 bp, Streptococcus pyogenes
gtggcaaaacaaaaaaatcgtaaaaaagcattgaaattagaaatgaagcgtaatggcttgttaaaaaaagcaggtcaagtttttgataaggcagttgaaagtgttgaaacagctgtggataaaaccatttctgctggtaaaaatcttgtggaaaaaggcagccaaacagttgaaaacctgacagcaagcaaggaaagacttactcttgatgagtttgcagggcagccagttgtagctggtatccgctctgaccttgtcgaaaccctatatgcagaaggcatccattcagcgcaagcttttaaggagtggacagaaaaagacctccttgctcttaagggcattggtccagcaacggttaaaaaattggtcgaaaatggtgcaagctttaaaaaatag

SEQ ID NO: 504 - protein, 131 aa, Streptococcus pyogenes
MAKQKNRKKALKLEMKRNGLLKKAGQVFDKAVESVETAVDKTISAGKNLVEKGSQTVENLTASKERLTLDEFAGQPVVAGIRSDLVETLYAEGIHSAQAFKEWTEKDLLALKGIGPATVKKLVENGASFKK

SEQ ID NO: 505 - DNA, 447 bp, Streptococcus pyogenes
ttggaggtttcttctgaagtagctgtgagcgcctcacagccggaagaattgcatcgattgcctaaccgtttgatacctgaggaagacaataataaactatcacgagtagccaaggaagtcgttactgagccaaggctaaataacccctttttgttacccaagaaggttctttcgttagaagatgatgctgctatccttaatcatttggaggaagaccgtgatgtcaataagttgttcctcgagccagttgcggctgaagccaagagagaaattaattttcatccaagtgaccagcaggtgactgctaaagttaaggagtcatctgattttcatcagaaacagcaccaaacagggattacttatggagatgatactctggcagatctgacgcatcatttgcttcattcagatggtgttattcctagtctaaatgataagagtgcttaa

SEQ ID NO: 506 - protein, 148 aa, Streptococcus pyogenes
MEVSSEVAVSASQPEELHRLPNRLIPEEDNNKLSRVAKEVVTEPRLNNPFLLPKKVLSLEDDAAILNHLEEDRDVNKLFLEPVAAEAKREINFHPSDQQVTAKVKESSDFHQKQHQTGITYGDDTLADLTHHLLHSDGVIPSLNDKSA

SEQ ID NO: 507 - DNA, 435 bp, Streptococcus pyogenes
ttggaatatgacaaaatttacccatacttagttgatattttcaaccggattttggttattgaagaaatgagcttaaagacgagtcagtttagtgatgtctctttaaaagagatgcacactattgaaattatcggcaaatatgatcaggtgactccaagtgatatcgccagagaattaatggtaacgttagggacagtaaccactagcttaaataaattagaagcaaaaggttatatcgcaagaacgcgatcacgctcagataggcgagttgtttacctgtcattaacaaaaaggggtcgacttttggaccgcctccatgcaaagttccataaaaatatggttggacatgtcattgctgatatgagtgatgaagagatgcaggcattggtgcgtggactagggaatctacatcaatttttggaggatttggtttaa

SEQ ID NO: 508 - protein, 144 aa, Streptococcus pyogenes
MEYDKIYPYLVDIFNRILVIEEMSLKTSQFSDVSLKEMHTIEIIGKYDQVTPSDIARELMVTLGTVTTSLNKLEAKGYIARTRSRSDRRVVYLSLTKRGRLLDRLHAKFHKNMVGHVIADMSDEEMQALVRGLGNLHQFLEDLV

SEQ ID NO: 509 - DNA, 435 bp, Streptococcus pyogenes
ttgagtaaacaattaagtaacataaaagcttttacccttctagaggcgttaatagccttactcgtgatatcagggtctttattggtttatcaaggtttgacccgaaccctccttaaacatagccattatctagcccgtcatgatcaagataattggctcttattttctcatcaattgcgagaggagttaagtggagcaaggttttacaaagtagctgataataaactatacgttgaaaaaggaaagaaagtactagcttttggccaatttaaaagtcatgattttcgaaaatcagctagtaatggaaaagggtatcaacccatgttatttggaatatcacgtagtcatattcacatagagcagtcacagatttgcattactttaaagtggaaaagtgggttagaaaggactttttattatgcctttcaagactaa

SEQ ID NO: 510 - protein, 144 aa, Streptococcus pyogenes
MSKQLSNIKAFTLLEALIALLVISGSLLVYQGLTRTLLKHSHYLARHDQDNWLLFSHQLREELSGARFYKVADNKLYVEKGKKVLAFGQFKSHDFRKSASNGKGYQPMLFGISRSHIHIEQSQICITLKWKSGLERTFYYAFQD

SEQ ID NO: 511 - DNA, 456 bp, Streptococcus pyogenes
gtgatttattcgtttcaaaatccctcagaggatgtcctaaaagcttacttggagtcagccaaaaccattgcggttgttggtctttctgaccgcaaagacacagcagcttatggtgtcgccaaatttatgcaggctatggattatcggatcattccagtcaatcccaaattagcaggtcagcttattttgggagagaaggtctatgccagtatcaaggcaattccctttgaggttgacattgtagatgtctttcgcagaagtgagtttttaccagaagttgccagagactttttagcaggtcaggccaaagtcttttgggcgcaattaggccttgaaaaccaagaagcacaaaccattttacggtcggcaggcaaagaggctattgtgatgaaccgctgcctaaaaatagactatttgcaattagtcgctaaaccagaatgcatcacaaatcattga

SEQ ID NO: 512 - protein, 151 aa, Streptococcus pyogenes
MIYSFQNPSEDVLKAYLESAKTIAVVGLSDRKDTAAYGVAKFMQAMDYRIIPVNPKLAGQLILGEKVYASIKAIPFEVDIVDVFRRSEFLPEVARDFLAGQAKVFWAQLGLENQEAQTILRSAGKEAIVMNRCLKIDYLQLVAKPECITNH

SEQ ID NO: 513 - DNA, 438 bp, Streptococcus pyogenes
gtgacactcactaattatgtccaagaagtttccctggctgattttggcaaaccacttcaccacaaggcttattggaacaagcgcctaaaaacaactggcggtcgcttttttccaaaagatggtcatttggattttaaccctaggatgcttgaggagcacggtgagcttatttttcggaaaattgttcgccatgagctctgccattaccatctttattttgaaggaagagggtaccatcataaagatagggatttcaaagatctgctagctcaagtaaacgggcttcgttatgtcccaactagctctaaatcaaagactaatcatcattatagttgccaaacctgtgggcaggtttatcaacgaaaaaggcgtatcaatctggctaaatatgtttgtggaaattgccacgggaaacttatggaaaaaaatcagtcgtaa

SEQ ID NO: 514 - protein, 145 aa, Streptococcus pyogenes
MTLTNYVQEVSLADFGKPLHHKAYWNKRLKTTGGRFFPKDGHLDFNPRMLEEHGELIFRKIVRHELCHYHLYFEGRGYHHKDRDFKDLLAQVNGLRYVPTSSKSKTNHHYSCQTCGQVYQRKRRINLAKYVCGNCHGKLMEKNQS

SEQ ID NO: 515 - DNA, 420 bp, Streptococcus pyogenes
ttgccctttatagcgaaacaaaccctgaaatctcagctcattccccaagataatcttttggcagaaagtcggttcaacgaaatcatggacttcttaacaggtgattttccccttgtttttaggccaatgatcaaccctcatcgctacactatttctcaagacaatcaagcgcttgaaaaagtcaaacaagcttcttacaagcggatggatattgctatgacgcatttagatagtcttattggggagagtgggcatgtttatcgagatcaacaaaccattgcagatgcttatgcttacgccatggcgctatggtctcaaaaaacaccaaaatcttacgagaattatccgcatctggcagcttttatggcaaaaatggtggaagattcagctgttcaacaagtgcttaatgcagctcactaa

SEQ ID NO: 516 - protein, 139 aa, Streptococcus pyogenes
MPFIAKQTLKSQLIPQDNLLAESRFNEIMDFLTGDFPLVFRPMINPHRYTISQDNQALEKVKQASYKRMDIAMTHLDSLIGESGHVYRDQQTIADAYAYAMALWSQKTPKSYENYPHLAAFMAKMVEDSAVQQVLNAAH

SEQ ID NO: 517 - DNA, 423 bp, Streptococcus pyogenes
gtgggcaatttcgcaacaacagatgacgtcattttgttatggcgtcccttatctgttgacgaattgaaacgtgcaaatgcactcttgaaagtcgtatcagatacattaagaatggaagctgacaaagttggcaaagacttagataaaacgatggttgataagccttattttgttaatgttattaaatcggttacggttgacattgtagcgagaacgctgatgacatctactcgaggcgaaccaatggcccaagagagccaatcagctttaggatacacatggtcaggcacttatttagttccaggcggcggtctttttattaaggacagtgagttgaagcgtcttggactaaaaaaacaacgatatggaggaattgaactttatggcgaaattgaaagggataacagttgctttagccgataa

SEQ ID NO: 518 - protein, 140 aa, Streptococcus pyogenes
MGNFATTDDVILLWRPLSVDELKRANALLKVVSDTLRMEADKVGKDLDKTMVDKPYFVNVIKSVTVDIVARTLMTSTRGEPMAQESQSALGYTWSGTYLVPGGGLFIKDSELKRLGLKKQRYGGIELYGEIERDNSCFSR

SEQ ID NO: 519 - DNA, 420 bp, Streptococcus pyogenes
gtgagcaaagctaaggcaattttaaaagacttacgcaatttagatttatatatcgctagtttaatcagacgtcgagataagattgaggcttcgttgctttctagccctaaatggtcgtctgataaggtgaatggtggtataaaacgtaagcaagatgatgtttacgtagagttgattgcaactgccaaagatattgaaaagaagactgctgaagctataagaaaacaaagagagcttcaaaacctgattgatagccttgaaaatacagacagtcaaacgattttgagcatggtctatattgataagatgactagatggcaagtgattgatgagctaaattgcagcgaaagcacctatttcagactgttaagagttgcaactaaggaattaaataatttgacagtaaatgacagcgattga

SEQ ID NO: 520 - protein, 139 aa, Streptococcus pyogenes
MSKAKAILKDLRNLDLYIASLIRRRDKIEASLLSSPKWSSDKVNGGIKRKQDDVYVELIATAKDIEKKTAEAIRKQRELQNLIDSLENTDSQTILSMVYIDKMTRWQVIDELNCSESTYFRLLRVATKELNNLTVNDSD

SEQ ID NO: 521 - DNA, 414 bp, Streptococcus pyogenes
ttgctacactcgtccttgccaatgctcacacacaattttagggcgagtgtggattttaaaaaggtgaaaaatatggaacaaatcaaaattacaggaacaggaacagcactaattttagatagagtaaaccgaatctttgccatctctggcagtttgactatgcaatgggattttattagtgattttaaaaagattgacgacgaaccgtcacttgatgaagatggagagttattcgaaacagcctacgacctcattcttgaagctaaacccaaaactaaaatcaatctaacatcatcatattttgctaaagagtataagaaagacgcagacgaaatcataaaagtattctcgtttatcgaagataacaagagaaatatctttgaaacccttggcattcgcggggtgcttgaatga

SEQ ID NO: 522 - protein, 137 aa, Streptococcus pyogenes
MLHSSLPMLTHNFRASVDFKKVKNMEQIKITGTGTALILDRVNRIFAISGSLTMQWDFISDFKKIDDEPSLDEDGELFETAYDLILEAKPKTKINLTSSYFAKEYKKDADEIIKVFSFIEDNKRNIFETLGIRGVLE

SEQ ID NO: 523 - DNA, 414 bp, Streptococcus pyogenes
gtgactaatccagttgatgtgaatttgattaatggcattgccctagcctttgaaggggatgcggtttattcctactatgttcgtcgtcatctcatttttcaaggtaaaacgaaacctagccagctacaccgtttagcaacgagatatgtttctgctaaggcacaagccaacttgattcaggctatgttagaagcgcagctattgaccgaaaaagaagaagacatctataagcgtggtcgcaataccaatagccatactaaagctaagaatgccgatattattacctatcgtatgtcgacaggttttgaagccattatgggttatcttgatatgatgggccaaaaagagcggttagaagaattgatcagatggtgtattgagtatgtagaaaagcaacaattgatatcctcataa

SEQ ID NO: 524 - protein, 137 aa, Streptococcus pyogenes
MTNPVDVNLINGIALAFEGDAVYSYYVRRHLIFQGKTKPSQLHRLATRYVSAKAQANLIQAMLEAQLLTEKEEDIYKRGRNTNSHTKAKNADIITYRMSTGFEAIMGYLDMMGQKERLEELIRWCIEYVEKQQLISS

SEQ ID NO: 525 - DNA, 531 bp, Streptococcus pyogenes
gtgagtaattttattagtccagtctatgagattaaatcaattccaattgaaaagatttctccaaatgattataatccgaattcagttgctccgcctgaaatgaaattattgtatgatagtataaaatctgatggttatactatgccgattgtttgctattacgataaggaagaggatcggtatagtattgttgatggttttcatagatatcgtataatgctagattattcagatatttatgaaagggaaagtgggagattacctgtttctgttattgataagtcattagactatcgaatggcttctaccattcgacataatagagctagaggaagtcatgatgttgatttgatgagtcagattgtaaaggatcttcatgagtgtgggcgaagtgataactggattgcaaaacatttaggaatggataaagatgaaattttaagactgaaacaaataacaggattggcttctctttttaaggaccatgagtttaatcaatcttgggaaccagaagagctattaaatgagtaa

SEQ ID NO: 526 - protein, 176 aa, Streptococcus pyogenes
MSNFISPVYEIKSIPIEKISPNDYNPNSVAPPEMKLLYDSIKSDGYTMPIVCYYDKEEDRYSIVDGFHRYRIMLDYSDIYERESGRLPVSVIDKSLDYRMASTIRHNRARGSHDVDLMSQIVKDLHECGRSDNWIAKHLGMDKDEILRLKQITGLASLFKDHEFNQSWEPEELLNE

SEQ ID NO: 527 - DNA, 495 bp, Streptococcus pyogenes
gtgcgttgtccaaaatgtaattaccataaatcgagtgttgttgacagtagacaagctgaagacggcaacaccattcgtcgtcgaagagaatgtgaacagtgtcatactcgctttactacctttgagcgtgttgaagaactccctttattagtcatcaaaaaagatggcacacgagagcaattttctagagataaaatattaaatggggttgttcaaagtgcgcaaaaacgacctgtctcgagcacagatattgaaaatgtcatttctcgtattgaacaagaagttcgaacaacctacgaaaatgaagtgtcaagtactgctattggtaatttagtgatggatgagttggccgaactcgatgaaatcacatatgtacgctttgctagtgtctacaagagtttcaaggacgttgatgaaatcgaagaacttttgcaacaaattacgaatcgcgtacgcggaaagaaaaaacgtttaaataatgatgaaaccaattga

SEQ ID NO: 528 - protein, 164 aa, Streptococcus pyogenes
MRCPKCNYHKSSVVDSRQAEDGNTIRRRRECEQCHTRFTTFERVEELPLLVIKKDGTREQFSRDKILNGVVQSAQKRPVSSTDIENVISRIEQEVRTTYENEVSSTAIGNLVMDELAELDEITYVRFASVYKSFKDVDEIEELLQQITNRVRGKKKRLNNDETN

SEQ ID NO: 529 - DNA, 531 bp, Streptococcus pyogenes
gtgaagatcatagctaaaaaggatctattcattaatgatgaaattcgcgttcgcgaagttcgtctcgttggtcttgaaggtgaacaattaggtattaaaccattgtctgaagcgcaatcattggctgatgcttcaaatgttgatttggttttaatccagccacaagctgttcctcctgttgccaaacttatggactatggaaagttcaaatttgagtatcaaaagaaacagaaagaacaacgtaaaaaacaaagcgttgtgactgtgaaagaagttcgtctcagtccagttatcgataaaggtgactttgaaacaaaacttcgtaacggtcgtaaattccttgaaaaaggaaataaagttaaggtttctattcgtttcaaaggacgtatgattactcataaagagattggtgccaaggtactagctgactttgctgaagcgactcaagatattgctatcattgagcaacgagcaaaaatggatggacgccaaatgtttatgcaacttgcaccaatttcagacaagaagtaa

SEQ ID NO: 530 - protein, 176 aa, Streptococcus pyogenes
MKIIAKKDLFINDEIRVREVRLVGLEGEQLGIKPLSEAQSLADASNVDLVLIQPQAVPPVAKLMDYGKFKFEYQKKQKEQRKKQSVVTVKEVRLSPVIDKGDFETKLRNGRKFLEKGNKVKVSIRFKGRMITHKEIGAKVLADFAEATQDIAIIEQRAKMDGRQMFMQLAPISDKK

SEQ ID NO: 531 - DNA, 537 bp, Streptococcus pyogenes
gtgaatgttactgaacaaaatagtcatcaaatcttaatccaaaagttattggtcagtatccactatttgactctttttcgagatgaactgaagcttgtagaacgaactccttctatacttggaggggaatttccagctcatttagtacagtctgagttgggagatattgttgcggccattgataccttggatatgcagcaacgcttgattgagtctaccttttggtatgaagaatcagcttttaagttgatgaacaaaactttggatattgtcgataattggattaaaggagtggatcatctgatagatttatgccagtccaaagaagtctttcaaattattattggagataaacgcattcgagtttttggggtcttaagtgatgttttttcatctttaaaagtgagtgctttgtcacttaaggaagctcctattccggatgtgctctatgaacatatccagagggttaatcttgaagaagaagcttttataaaatattaccaaagccctaaggtacccacaggtgagtttgaataa

SEQ ID NO: 532 - protein, 178 aa, Streptococcus pyogenes
MNVTEQNSHQILIQKLLVSIHYLTLFRDELKLVERTPSILGGEFPAHLVQSELGDIVAAIDTLDMQQRLIESTFWYEESAFKLMNKTLDIVDNWIKGVDHLIDLCQSKEVFQIIIGDKRIRVFGVLSDVFSSLKVSALSLKEAPIPDVLYEHIQRVNLEEEAFIKYYQSPKVPTGEFE

SEQ ID NO: 533 - DNA, 474 bp, Streptococcus pyogenes
gtgtttcctaatattctatttactgaagcaaggacgcagccagagctttttgatcttgttgctagccacttggaaaaggttgggtatgtgacgcaagagtaccatcaggctttagtggagcgtgaggcggtatttccgacaggactcaaagtggacctcaaagatgggtcagatattttgtatgcggctattccgcatacagaaaccaagtattgcttggttgatcaagtggtctatgttagaaatagtcaagcccttacctttaagcacatgattaatccagaggaagactgtttggtaacggatttcttctttattatcaatagtcaaaacgagggtcaaacgacgattctatccaatctcattaccttctttattacgaaaggcaatcttagctatctagccagtctaaaagatgataaacaagctatttcaaactatttaatagaaaaaggagtgtttcagcatgattaa

SEQ ID NO: 534 - protein, 157 aa, Streptococcus pyogenes
MFPNILFTEARTQPELFDLVASHLEKVGYVTQEYHQALVEREAVFPTGLKVDLKDGSDILYAAIPHTETKYCLVDQVVYVRNSQALTFKHMINPEEDCLVTDFFFIINSQNEGQTTILSNLITFFITKGNLSYLASLKDDKQAISNYLIEKGVFQHD

SEQ ID NO: 535 - DNA, 501 bp, Streptococcus pyogenes
ttgaatattcaagaaatcaaagatttgatggctcagtttgatacctcaagcctacgtgaatttttattcaaaacaaatgaaggtgagctaatctttagtaaaaacgaacaacacctcaatgcatcgacatcaaatcaagaacatgctgtgcctgtaccacaggtacaacttgttccgaatccaactgcttcggaagcgtccagtccagcatcagttaaggatgttcctgtagaggagcaaccacaagcagaatcttttgtagcagaaggtgatattgttgaaagtcctttagtcggtgtagcctatcttgcagctagccctgacaagccaccatttgtggcagtcggagatactgtaaaaaaaggacaaacccttgtgattatcgaagccatgaaggtgatgaacgaagtgccagcgccatgtgatggtgtgattacagaaattttggtatcaaatgaagatgtcattgaatttggacaaggattggtgcggatcaaatga

SEQ ID NO: 536 - protein, 166 aa, Streptococcus pyogenes
MNIQEIKDLMAQFDTSSLREFLFKTNEGELIFSKNEQHLNASTSNQEHAVPVPQVQLVPNPTASEASSPASVKDVPVEEQPQAESFVAEGDIVESPLVGVAYLAASPDKPPFVAVGDTVKKGQTLVIIEAMKVMNEVPAPCDGVITEILVSNEDVIEFGQGLVRIK

SEQ ID NO: 537 - DNA, 507 bp, Streptococcus pyogenes
ttgaaaattgccatcattggacatagtggctctggcaagtcaaccttagcacgatttttaggccaacattaccattgtgaggtattccatttagaccaactacacttctcatcgaactggcaagaacggtcagatcatgacatgatagctgatttatcaacatgcctgctcaaacaagatttgattattgaggggaattatgccaattgtctctatgaagagcgcatgagtgaagctgattacattatctatgttaatttcagtcggtttcattgtgtctatcgagcatttaagcgttatttaaactataggggaaaaacgcgtcctgatatggctgacaactgtcaggaaaaatttgacgttgcgtttgtgaaatggattctactagatggacgttcaagaaaccaattaaaaaaataccaatccgttgtccaaaaatactctcataaaaccattgtcttaacaaatcaaaagcagctaagtcattatatgaatacgatcaactaa

SEQ ID NO: 538 - protein, 168 aa, Streptococcus pyogenes
MKIAIIGHSGSGKSTLARFLGQHYHCEVFHLDQLHFSSNWQERSDHDMIADLSTCLLKQDLIIEGNYANCLYEERMSEADYIIYVNFSRFHCVYRAFKRYLNYRGKTRPDMADNCQEKFDVAFVKWILLDGRSRNQLKKYQSVVQKYSHKTIVLTNQKQLSHYMNTIN

SEQ ID NO: 539 - DNA, 570 bp, Streptococcus pyogenes
ttgactgaaaaaattaatattcaagaggttcttgttgtagaaggcaaggacgacacggctaacctacgccgtttttacgaggtggatacctatgagactagaggctctgctatcactgaagaagatttagaacgaatcaatcgcctaaacgatttgcgtggtgttatcgttttaacagacccagattataatggtgagcgcattcgtaagctcattatggctgctgtgccaacagctcgtcatgcctttttaaaccgaaacgaggcggttccgagttctaagagtaagggtcgttccttaggggttgaacatgccaattttgaggatctccaaaaggcacttgctcatgtcactcagcaatatgatgatgagtcttattttgacattcgtcaaacagacctgattcgtctagggcttttaatggcgtcagatagccgtaaacgcagggaatacttgggtgaaaagctccgcatcggttatgccaacggcaaacaactgctcaagcgcctcgaattatttggcattaccctagcagaagtggaagaagtgatggagacatatgaggagtaa

SEQ ID NO: 540 - protein, 189 aa, Streptococcus pyogenes
MTEKINIQEVLVVEGKDDTANLRRFYEVDTYETRGSAITEEDLERINRLNDLRGVIVLTDPDYNGERIRKLIMAAVPTARHAFLNRNEAVPSSKSKGRSLGVEHANFEDLQKALAHVTQQYDDESYFDIRQTDLIRLGLLMASDSRKRREYLGEKLRIGYANGKQLLKRLELFGITLAEVEEVMETYEE

SEQ ID NO: 541 - DNA, 648 bp, Streptococcus pyogenes
gtgtcttttagtgtaaagcagagtggtcttattttcattcctaactatcaattggatattaggaaagaagaaaatcataaaaaatataaagtctatattcgtgagaccgcacaattcttcatttacaacaaggaggcgtctgaacttaatcgctatatgcgagggcatgagctcatttgccagttaaccaatgatagcaagagtattccaaaaagaagacgacaaaccattgatacacttaagaaaaagattgaagaaataagtctcctcattgagttagatacggagaataagccttatcaagatattaaagatgacattgttaaagatatggctcaattagatttgaccattacagagttgcaggaccatattgctcatctcaataaggttgcggaggtcttgcttaatctgaacaacaacgatatagagaaccgccgtttggccagatatgactatgccaagatgaacttgactgcagctataaaaatagaagaagttgagaaagagattgaaacttctcaaaatgaacttaatatatccatagatgagtatgaatatctagtaagaaggttggaaaagtttggagagatcttgagtgatagcaaaattatcgatacttctcgaaatgaaatacaatgggagtaa

SEQ ID NO: 542 - protein, 215 aa, Streptococcus pyogenes
MSFSVKQSGLIFIPNYQLDIRKEENHKKYKVYIRETAQFFIYNKEASELNRYMRGHELICQLTNDSKSIPKRRRQTIDTLKKKIEEISLLIELDTENKPYQDIKDDIVKDMAQLDLTITELQDHIAHLNKVAEVLLNLNNNDIENRRLARYDYAKMNLTAAIKIEEVEKEIETSQNELNISIDEYEYLVRRLEKFGEILSDSKIIDTSRNEIQWE

SEQ ID NO: 543 - DNA, 576 bp, Streptococcus pyogenes
ttgaaattagacgtatttgcaggacaagaaaaaagcgagctttccatgattgaagtggcgcgtgccattttggaagaacgcggtcgcgacaatgagatgtactttagcgatttagtcaatgagattcaaaattacttaggaaaatctgatgcaggtattcgtcatgcattaccatttttctatactgacttaaatacggatggctcatttattcctctaggtgaaaacaaatggggacttcgttcgtggtatgctattgatgaaattgatgaagaaattattactctagaagaagatgaagatggcgcacaaaaacgtaagaaaaaacgcgttaatgctttcatggatggagatgaagacgctattgattatagagatgatgatccagaagatgaagatttcacagaagaatcagctgaggttgaatatgatgaagaagatccagatgatgaaaaatcagaagtggagtcatatgattcagaattgaatgaaattatccctgaagatgattttgaagaagttgatatcaatgaagaagacgaagaagatgaagaagatgaagaaccagttctctaa

SEQ ID NO: 544 - protein, 191 aa, Streptococcus pyogenes
MKLDVFAGQEKSELSMIEVARAILEERGRDNEMYFSDLVNEIQNYLGKSDAGIRHALPFFYTDLNTDGSFIPLGENKWGLRSWYAIDEIDEEIITLEEDEDGAQKRKKKRVNAFMDGDEDAIDYRDDDPEDEDFTEESAEVEYDEEDPDDEKSEVESYDSELNEIIPEDDFEEVDINEEDEEDEEDEEPVL

SEQ ID NO: 545 - DNA, 558 bp, Streptococcus pyogenes
ttgaataatttagagaaacaaacaagggaaatcgtcattgatgttgtagaacgctctgctattcaaccaggtaatctttttgttctaggtctttcatctagcgaaattttgggtagtagaattggaaaacaatctagtctagaagtaggtcaaatagttgttgaagttgtgttagatgaattaaataagcgtggtgttcatttggctgtacaaggttgtgaacacgtcaatcgtgccttggtagtagagaggcatgtggcagaatctaagcagttagagattgtcaatgtggttccgaatcttcatgctggtggcagtgctcagatggctgcttttcaacttatgtcagaccctgtcgaagtagaagaagttattgcacacgctggacttgatataggtgatactgctataggaatgcatattaagcgtgttcagatccctctgattccttgtcaacgagagctaggaggtgctcatgtgacagctttggctagtcgaccaaaattaattggtggagctagggctgattacaatatggatattatccgtaaatcctaa

SEQ ID NO: 546 - protein, 185 aa, Streptococcus pyogenes
MNNLEKQTREIVIDVVERSAIQPGNLFVLGLSSSEILGSRIGKQSSLEVGQIVVEVVLDELNKRGVHLAVQGCEHVNRALVVERHVAESKQLEIVNVVPNLHAGGSAQMAAFQLMSDPVEVEEVIAHAGLDIGDTAIGMHIKRVQIPLIPCQRELGGAHVTALASRPKLIGGARADYNMDIIRKS

SEQ ID NO: 547 - DNA, 585 bp, Streptococcus pyogenes
gtgaatgatataacacagttaagacaaaacgttcttgaaaaagcacatcaagaaggtcaacagtgcctaaagatagcgacagatagtcttgatactgactttaaagagcgtcaacagcaaggactacacgatttaaaagcaaagcgtcaaaaagagttaaaagctcttgaacagcaatttcaggttgcgcagcagcaactcaaaaatcaagaaagacaagctctactagcattaaaacaagacagtataaaggagctatttgaagcttctttggagaagatgacgaacttttctaaggaagaagaattggcttttttgaagcaagtcttgtctaaatatccagaacagccattgcaagttacttttggcgaaaaaacagggcaaaagttcagttcttatgattgtgctgagctgagattagcatttcctcaattaagctataatcaagagctaattcctcaggaagcaggatttttagtcagtttagaccaagtcgatgacaattatttataccgttaccttttagaatcagttcttaaagaagaaagctcccgcatcattgatatgcttttttcagagatatag

SEQ ID NO: 548 - protein, 194 aa, Streptococcus pyogenes
MNDITQLRQNVLEKAHQEGQQCLKIATDSLDTDFKERQQQGLHDLKAKRQKELKALEQQFQVAQQQLKNQERQALLALKQDSIKELFEASLEKMTNFSKEEELAFLKQVLSKYPEQPLQVTFGEKTGQKFSSYDCAELRLAFPQLSYNQELIPQEAGFLVSLDQVDDNYLYRYLLESVLKEESSRIIDMLFSEI

SEQ ID NO: 549 - DNA, 663 bp, Streptococcus pyogenes
ttgacatcgaaaaaacagggacttttacactctctcttcaagcttgatagtaaatggatgagggctagcgcagcactgtttgatttgctcgtgtttaatctcttatttgtcttgtcctgccttccccttctaacgattggggttgctaaaatggctttgtatgcgagtttgttggattggcgagaaggtcaagttagtcagcttgttactacttatagctctcattttaaatattactttaaaagtgggctacgccttggccttattgagcttgggataatgactatttgtctcttagatcttttcttaattcgaaaccaatcaggcctagtttttcaagggtttaaagtactttgcgttgctgttttatttttggtggttatactctttttgtacgcttatcctcaggccgtcaaaagagacctttccctatctacgctgtttaagcgaagctttttattagcaggactcttttttccatggagttttgctttcttggcttttatttgtctcacgatatttagcctacaattgtctctgttaacgttatttggaggcgtgtctttgctagctatcatcggcatcagtagtctaacttatctctacttgattatcatggaatctcttcttaggcgattcccacttaataatgacattgaataa

SEQ ID NO: 550 - protein, 220 aa, Streptococcus pyogenes
MTSKKQGLLHSLFKLDSKWMRASAALFDLLVFNLLFVLSCLPLLTIGVAKMALYASLLDWREGQVSQLVTTYSSHFKYYFKSGLRLGLIELGIMTICLLDLFLIRNQSGLVFQGFKVLCVAVLFLVVILFLYAYPQAVKRDLSLSTLFKRSFLLAGLFFPWSFAFLAFICLTIFSLQLSLLTLFGGVSLLAIIGISSLTYLYLIIMESLLRRFPLNNDIE

SEQ ID NO: 551 - DNA, 591 bp, Streptococcus pyogenes
ttgtcagctatcatccgtcaatctacctctaaacgtatctctgacaagcgtgggatctacttagtggaaaaacttgtctcattagccaagcagtcttattttactgttacgaaaacctctccgatgatagaagaggttcgctactatgccaaagaattacttagactttctgaacgtcgtcaagctatttttgataagatggtggcgtcggctcaacctttaccagaagacaagattctacgctctattccaagtatcgtagaaacaactgcaacaagtattattggcgaactcggtgctattcgtcgttttcaatctgctaatcaaattaatgctttcattgggattgactttagacattatgagtctggcaactatctagctcaagagcacattaccaaacgtgggaatccttatgctccaaagattcttttcaagtgtatccatgacattgcttttgctagtcataccaatccttgtcatatcgcagacttctatgagaaacgaaaaaggcaatcgcaaacagcttcaaccaagccacatacgattgcctctagacattgccttgtcagacaatgctttacctcataa

SEQ ID NO: 552 - protein, 196 aa, Streptococcus pyogenes
MSAIIRQSTSKRISDKRGIYLVEKLVSLAKQSYFTVTKTSPMIEEVRYYAKELLRLSERRQAIFDKMVASAQPLPEDKILRSIPSIVETTATSIIGELGAIRRFQSANQINAFIGIDFRHYESGNYLAQEHITKRGNPYAPKILFKCIHDIAFASHTNPCHIADFYEKRKRQSQTASTKPHTIASRHCLVRQCFTS

SEQ ID NO: 553 - DNA, 600 bp, Streptococcus pyogenes
ttgaaggtgaaaaaaaggagaagaagggctaaatcatcagtaaatcgacttgtcttagggttagtattacttaatctgattgttagtatgtggacactaaaattgggaaaccagcgattagctccgtatgcggatcacgaaactctgacatttgtcaggaagattagtcatgctgctcaatcagtcgctcaaaagaaacagttatatagttcggtgatgatggctcaggccattttagaatccaataatggtaagtcacaactaagtcaaaaaccttattataattttttcgggattaaggggagctataaagaacggtcagtcatttttccaactttagaagacgatggacaagggaatctttatcaaattgatgctgcttttcgttcctatgggagcctgacagcttgttttttagattacgcaagagttttgaatgatccactttatgacaaaacccacaaaaagttttggtctcattatcaagatgctactgcaaccttaacaggcacttacgccactgatacaacttaccataccaaattaaatgaattgattgaatggtatcaactcactaattttgatggtctaatgaaatag

SEQ ID NO: 554 - protein, 199 aa, Streptococcus pyogenes
MKVKKRRRRAKSSVNRLVLGLVLLNLIVSMWTLKLGNQRLAPYADHETLTFVRKISHAAQSVAQKKQLYSSVMMAQAILESNNGKSQLSQKPYYNFFGIKGSYKERSVIFPTLEDDGQGNLYQIDAAFRSYGSLTACFLDYARVLNDPLYDKTHKKFWSHYQDATATLTGTYATDTTYHTKLNELIEWYQLTNFDGLMK

SEQ ID NO: 555 - DNA, 645 bp, Streptococcus pyogenes
gtggttattgacaaatctattccaaaagcgactgcaaagcgcttatcactttattaccgtatttttaaacgattccatgctgaccaagttgaaaaagccagttctaaacaaattgcagatgcaatgggaattgactctgctactgtacgccgtgacttttcttattttggagaattggggcgtcgtgggtttggctatgatgttaccaaattgatgaatttttttgctgacttgcttaatgatcactctacaacaaacgttatcttagttggatgcggtaatatagggcgtgctctattacattaccgcttccatgatcgtaataagatgcaaattgccatgggttttgataccgatgataacgctcttgttggtactaaaacagctgataatattccagtccatggtatctcatctgtcaaagaacggattgcgaacactgacattgaaacggctatcttaacggttcccagcattcatgctcaagaagttactgatcaacttattgaagcaggaatcaaaggaatcttgagttttgctcctgttcacctacaagttcctaaaggagttattgttcaatctgtcgatttgaccagtgagctccagacactactctattttatgaatcaaaatcatctagattaa

SEQ ID NO: 556 - protein, 214 aa, Streptococcus pyogenes
MVIDKSIPKATAKRLSLYYRIFKRFHADQVEKASSKQIADAMGIDSATVRRDFSYFGELGRRGFGYDVTKLMNFFADLLNDHSTTNVILVGCGNIGRALLHYRFHDRNKMQIAMGFDTDDNALVGTKTADNIPVHGISSVKERIANTDIETAILTVPSIHAQEVTDQLIEAGIKGILSFAPVHLQVPKGVIVQSVDLTSELQTLLYFMNQNHLD

SEQ ID NO: 557 - DNA, 570 bp, Streptococcus pyogenes
ttggctcaactctattataaatatgggacaatgaattctggtaaaaccattgaaattttaaaagttgctcataactatgaagaacaaggcaaacctgttgtcattatgacaagtgctcttgatacacgtgatggttttggcatcgtctcaagccgtattggtatgcgacgagaagctatccccatttcaaatgacatggatattttcacatttattgcccaattggaggaaaaaccttattgtgtcctgattgacgaaagccaatttttaagcaagcaaaatgtttatgatttggcgcgtgtggtggatgagctaaatgttcctgtcatggcttttggtttgaaaaatgatttccaaaacaatctttttgaaggttcaaaacatttgctattattggccgataagattgatgaaatcaaaacaatttgccaatactgtagtaagaaagcaaccatggttttaaggacagaaaacggaaaacctgtctatgaaggtgatcagatacaaattggtggtaatgaaacatatatcccagtttgtcgaaaacattattttaatccagatatttaa

SEQ ID NO: 558 - protein, 189 aa, Streptococcus pyogenes
MAQLYYKYGTMNSGKTIEILKVAHNYEEQGKPVVIMTSALDTRDGFGIVSSRIGMRREAIPISNDMDIFTFIAQLEEKPYCVLIDESQFLSKQNVYDLARVVDELNVPVMAFGLKNDFQNNLFEGSKHLLLLADKIDEIKTICQYCSKKATMVLRTENGKPVYEGDQIQIGGNETYIPVCRKHYFNPDI

SEQ ID NO: 559 - DNA, 642 bp, Streptococcus pyogenes
gtgataagtcctaaaaaagagataacaagttcaaaatatcaaaaaattgctatttcagtagctcagcgtatcgcaaatggcgaatatgaagtgggcgaaaagttaaagtcaagaactactatcgcctcgacatttaatgtatcaccagaaacggctcgtaaaggcctgaatattttagctgacttgaaaattttgactttaaaacatggtagtggagctattgtgctgtcaaaagaaagagctattgagtttataaatcaatacgaatcaacccattccatcgctgttttaaaagaaaaaatacgtgagactattaatgatcagggaaaagcaatggaaaaaatggctgttttggttaatgattttttaatgcaaagtcaatctgttagtaagcaatacccattagcaccttatgagattatttgtaatcaagattcggaacattttggcaaatctattggtgtgttaaatatctggcaccagacaggagcaactatcgtcgctattgaacatgctggtcagtttatcgtttcaccaggtccttattctgttattgaaaaaggcgatcatatttatttcgttggtgatgagtcagtcatttcacgaatgaagaccttttttaatttacgaaaaggattataa

SEQ ID NO: 560 - protein, 213 aa, Streptococcus pyogenes
MISPKKEITSSKYQKIAISVAQRIANGEYEVGEKLKSRTTIASTFNVSPETARKGLNILADLKILTLKHGSGAIVLSKERAIEFINQYESTHSIAVLKEKIRETINDQGKAMEKMAVLVNDFLMQSQSVSKQYPLAPYEIICNQDSEHFGKSIGVLNIWHQTGATIVAIEHAGQFIVSPGPYSVIEKGDHIYFVGDESVISRMKTFFNLRKGL

SEQ ID NO: 561 - DNA, 597 bp, Streptococcus pyogenes
gtgctttatccaacacccattgcaaagttaattgacagttactctaaacttccaggaattggtatcaagacggcgacgagattagccttttatactattggaatgtcaaatgaagatgtcaatgattttgctaaaaacttattagcagctaaaagagaactgacctattgttcgatttgtggaaaccttaccgatgacgatccttgtcacatttgcacagacacgagtcgtgatcagacgaccattctggtagtagaagatgctaaagatgtttctgccatggaaaaaatccaagagtatcatggctattatcatgtgcttcacggcttgatttcgcctatgaatggtgtggggccagatgacatcaaccttaaaagtttaattacccgtctaatggatggtaaggtgagcgaagttatcgtagctaccaatgccacagcagatggggaagcaacgtccatgtatatttcacgtgtcttgaaaccagccgggattaaggtaactcgtttggcaagaggtctcgcagtaggttcagatattgagtatgctgatgaagtaacattattgagagctattgagaatcgtactgaactttaa

SEQ ID NO: 562 - protein, 198 aa, Streptococcus pyogenes
MLYPTPIAKLIDSYSKLPGIGIKTATRLAFYTIGMSNEDVNDFAKNLLAAKRELTYCSICGNLTDDDPCHICTDTSRDQTTILVVEDAKDVSAMEKIQEYHGYYHVLHGLISPMNGVGPDDINLKSLITRLMDGKVSEVIVATNATADGEATSMYISRVLKPAGIKVTRLARGLAVGSDIEYADEVTLLRAIENRTEL

SEQ ID NO: 563 - DNA, 576 bp, Streptococcus pyogenes
ttgatatttaattttaaggagaatatagtgaaaaagaaattagttttagctaccttatgtctatcaatgggtgctgtgagtgttagagcggaaagtgattttgggaatgctaatgaaatcgggctaggtttttatggtagtgatgactatactaaccaacctgctttaacaggagaccaagcgaaaataggcttcagaaacgattggaaagatgctagagattttggagtaaaaccaataaatctgggagatagtaaaatcgaagtaaaaacaaatccgggagctcttgtaagagtttccttgacaacgggtgaaacaaccaatagtatatgggagttaacaagtgtatcttcctcaatgagtaacggtatctacactaacacttataaaataaagccaactattgcaaattcttcaggaattgcaacgttcgatttagcgaactcaggaaaatacgacaaggaaaaaagtgaaattataaagagtactgagagtaatgcaaagaaaggtgatacttactcagttactacaagtatagatggatggacaataggttatggagaatggactgtgtga

SEQ ID NO: 564 - protein, 191 aa, Streptococcus pyogenes
MIFNFKENIVKKKLVLATLCLSMGAVSVRAESDFGNANEIGLGFYGSDDYTNQPALTGDQAKIGFRNDWKDARDFGVKPINLGDSKIEVKTNPGALVRVSLTTGETTNSIWELTSVSSSMSNGIYTNTYKIKPTIANSSGIATFDLANSGKYDKEKSEIIKSTESNAKKGDTYSVTTSIDGWTIGYGEWTV

SEQ ID NO: 565 - DNA, 789 bp, Streptococcus pyogenes
ttggaaactaaatacgcatttgcaaggcaaatcattaaagaagcagggctttttatcaagtcaaaaatgtcagagcagctagatattcaggtgaaaacacaatttgatgatctggttaccaatgttgatcaagaaactcaacagttactgatggatcgtattcatcagacctatccttgtgatgccattttagctgaagaaaatgacgttcgtcaccccattaatcaaggaaatgtttgggtcatcgatcccattgatggaacggttaactttattgtgcagggatcacagtttgcagtgatgattgcctattatgaacaaggaattggtcaatttgggcttatttatgatgtgatggcagatcaattactagctggtggtggtgattttgaagttactttaaacggtgataagcttccagcttaccaagaaaaacctttagagcgtagcttaattggctgcaatgcaggcatgtttgccagaaatgatcgtaaccttgctcatctaattgcaaagactttaggtgtaagggtttatggtggtgcaggtatctgcatggttaaggtcatgaagcaggaattactggcctatttttcatttatccaaccatgggattacgcagcagcaaaagtactaggcgataaactgggttatgttttactaactattgacggatatgagcctgattttcaaacacgtcaaaaaatcatgtttgttcctaaatgccaactcactaggatagcgtcttttctaacaaaggactctgccatcacacttgaagatcaatag

SEQ ID NO: 566 - protein, 262 aa, Streptococcus pyogenes
METKYAFARQIIKEAGLFIKSKMSEQLDIQVKTQFDDLVTNVDQETQQLLMDRIHQTYPCDAILAEENDVRHPINQGNVWVIDPIDGTVNFIVQGSQFAVMIAYYEQGIGQFGLIYDVMADQLLAGGGDFEVTLNGDKLPAYQEKPLERSLIGCNAGMFARNDRNLAHLIAKTLGVRVYGGAGICMVKVMKQELLAYFSFIQPWDYAAAKVLGDKLGYVLLTIDGYEPDFQTRQKIMFVPKCQLTRIASFLTKDSAITLEDQ

SEQ ID NO: 567 - DNA, 819 bp, Streptococcus pyogenes
ttgttaattccccgtaaaattaggcattttctgagaactaaaaaacatgttcttattaatggtcattctgttaactggcaaagttgtgttaaatacggtgatcaggtcaaacttttttttgatcacgaagattatcctgaaaagattatcgtgatggggcaggccgaaaaagtaacctgcctttatgaagatgagcacatcattattgttaacaaacctgaagggatgaaaacacacggcaatgatccaacagagttggcgctgctcaaccacgtgtctgcttacacgggacagacctgctatgtggttcatcgtctggataaggaaacaagtggggccattttatttgctaaaacaccttttatcttaccaatccttaatcgtcttttagaaaaacgagatatccatcgagaatatttggcactagttcacggatccttagacagtcctagggtaacttaccatcatccaattggtcgtcatcgacatgaccgcagaaaacgtgttgtcgatccgataaatggcaagaaagctattactgaggtaactctagtcaaaaacttccacaaaacggcaagcttactcacttgtcaattacaaactggacggactcatcaaattcgagtccatttagcccatcaaggtcatgttttatttggtgatcctttgtattccaatggaaaaaaagattgtgctcgactgatgctccatgcttatcaattacgtttgaaacaccctctaacccaagaagacatttgcgtgcaagctaaatcagctacatttgacgcagtcttaaacgctcaaaaggctaggaaataa

SEQ ID NO: 568 - protein, 272 aa, Streptococcus pyogenes
MLIPRKIRHFLRTKKHVLINGHSVNWQSCVKYGDQVKLFFDHEDYPEKIIVMGQAEKVTCLYEDEHIIIVNKPEGMKTHGNDPTELALLNHVSAYTGQTCYVVHRLDKETSGAILFAKTPFILPILNRLLEKRDIHREYLALVHGSLDSPRVTYHHPIGRHRHDRRKRVVDPINGKKAITEVTLVKNFHKTASLLTCQLQTGRTHQIRVHLAHQGHVLFGDPLYSNGKKDCARLMLHAYQLRLKHPLTQEDICVQAKSATFDAVLNAQKARK

SEQ ID NO: 569 - DNA, 834 bp, Streptococcus pyogenes
gtgggtattaaagtttataaaccaacgacaaatggccgtcgtaacatgacttctttggatttcgcggaaatcacaacaagcacgcctgagaaatcattgcttgtttctcttaagagcaaagctggtcgtaacaacaatggtcgcatcacagttcgtcaccaaggtggtggacacaaacgtcattaccgtttgatcgacttcaaacgtaacaaagatggcgttgaagcagttgttaaaacaatcgaatacgatccaaaccgtactgcaaacatcgcacttgtacattacactgacggtgtgaaagcttacatcattgcacctaaaggtcttgaagtaggtcaacgtattgtttctggtccagatgcagatatcaaagttggtaacgcacttccattagcaaacattcctgtcggtacagttgttcacaatattgagttgaaacctggtaaaggtggagaacttgttcgtgcagctggagcttctgctcaagtacttggtcaagaaggtaaatacgttcttgttcgtcttcaatcaggcgaagttcgtatgattcttggtacatgccgtgcaactatcggtactgttggtaacgaacaacaatcacttgttaacattggtaaagcaggacgtagccgttggaaaggtatccgcccaacagttcgtggttctgtaatgaaccctaacgatcacccacacggtggtggtgaaggtaaagcaccagttggacgtaaagcgccatcaactccatggggtaaaccagcgcttggtcttaaaactcgtaacaagaaagctaaatcagacaaacttatcgttcgtcgtcgtaacgaaaaataa

SEQ ID NO: 570 - protein, 277 aa, Streptococcus pyogenes
MGIKVYKPTTNGRRNMTSLDFAEITTSTPEKSLLVSLKSKAGRNNNGRITVRHQGGGHKRHYRLIDFKRNKDGVEAVVKTIEYDPNRTANIALVHYTDGVKAYIIAPKGLEVGQRIVSGPDADIKVGNALPLANIPVGTVVHNIELKPGKGGELVRAAGASAQVLGQEGKYVLVRLQSGEVRMILGTCRATIGTVGNEQQSLVNIGKAGRSRWKGIRPTVRGSVMNPNDHPHGGGEGKAPVGRKAPSTPWGKPALGLKTRNKKAKSDKLIVRRRNEK

SEQ ID NO: 571 - DNA, 756 bp, Streptococcus pyogenes
gtggaatgctatcgtgatcgtcaattgttatcaacttatcacaaacaagtgactcaaaagaagccctcagaaatggaggaggtgtggcaaaaggctaaggcgtataacgctaggcttgggattcagcctgttccagatgctttttcatttagggatggcattcatgataaaaactacgaaagcctacttcaaattgaaaacaatgatattatgggatatgttgaagtgccctctattaaagtgacgttacccatataccactatacgacagacgaggtgctaactaaaggagcaggtcacttatttggaagtgccttaccagttggtggtgacgggactcacacggttatttctgctcatagaggccttccatcggcagaaatgtttactaatttgaatttagtgaaaaagggagatactttttactttcgtgtgttaaataaagtattggcttataaagttgatcagatactaactgttgaaccagatcaagtcacatcactttctggagtcatggggaaagattatgctactttggttacctgcacaccatatggtgttaacaccaagcgtctattggtccgaggtcatagaattgcatatcattataaaaagtatcaacaggctaaaaaagcaatgaaactcgtggataaatcaagaatgtgggcagaagtagtgtgtgctgctttcggggtggttatagctattattttagtgtttatgtattcgcgagtaagtgctaagaaaagcaagtga

SEQ ID NO: 572 - protein, 251 aa, Streptococcus pyogenes
MECYRDRQLLSTYHKQVTQKKPSEMEEVWQKAKAYNARLGIQPVPDAFSFRDGIHDKNYESLLQIENNDIMGYVEVPSIKVTLPIYHYTTDEVLTKGAGHLFGSALPVGGDGTHTVISAHRGLPSAEMFTNLNLVKKGDTFYFRVLNKVLAYKVDQILTVEPDQVTSLSGVMGKDYATLVTCTPYGVNTKRLLVRGHRIAYHYKKYQQAKKAMKLVDKSRMWAEVVCAAFGVVIAIILVFMYSRVSAKKSK

SEQ ID NO: 573 - DNA, 828 bp, Streptococcus pyogenes
ttgagaaaggttttgagagtgaagaaaaacattaaaattgcaagaatagtccccttagttctattattagtggcctgtggtcgtggtgaggtaacggcacaatcatctagtggttgggaccagttggtttacttatttgccagagcaattcaatggctttcctttgatggttcaattggtgttggcattattctttttacccttactatccgtctcatgctcatgcctttgtttaacatgcaaatcaaatcaagccagaagatgcaagacatccaacctgagcttagagaattgcaaaggaaatacgctggtaaagacacacaaacgcggatgaagttggctgaagaaagtcaagccctttacaaaaaatatggggttaacccttatgctagtctcttacccctcttaattcagatgccagttatgattgccttattccaagccttgacacgggtatctttcttaaaaacagggactttcttgtgggtggaattggcacaacatgatcatttgtaccttttaccagttttggcagctgtcttcactttcttgtccacttggttgaccaatctagcggctaaagaaaaaaatgtcatgatgactgttatgatttatgtgatgccgctaatgatctttttcatgggctttaacttggctagtggagtagtgctctattggacggtctccaatgcctttcaagtggtacaactactgttattaaacaatccttttaagattattgcggaaagacaacgtcttgccaatgaagaaaaagaacgccgtcttcgtgaacgtcgtgctcgtaaaaaagcaatgaagagaaaatag

SEQ ID NO: 574 - protein, 275 aa, Streptococcus pyogenes
MRKVLRVKKNIKIARIVPLVLLLVACGRGEVTAQSSSGWDQLVYLFARAIQWLSFDGSIGVGIILFTLTIRLMLMPLFNMQIKSSQKMQDIQPELRELQRKYAGKDTQTRMKLAEESQALYKKYGVNPYASLLPLLIQMPVMIALFQALTRVSFLKTGTFLWVELAQHDHLYLLPVLAAVFTFLSTWLTNLAAKEKNVMMTVMIYVMPLMIFFMGFNLASGVVLYWTVSNAFQVVQLLLLNNPFKIIAERQRLANEEKERRLRERRARKKAMKRK

SEQ ID NO: 575 - DNA, 729 bp, Streptococcus pyogenes
gtggaacctaaatatcaacgtatattaattaagttatctggtgaagcattagcaggtgaaaaaggagttggcattgacattccaactgttcaggctattgcaaaagaaattgccgaagttcatgtgtcgggagtacagatcgctcttgttattggtggaggcaatctctggcgtggagagcctgcagcagacgctggaatggaccgtgttcaggctgattacactggcatgcttggaacggtgatgaatgccctagtcatggctgatagtcttcaacattatggtgttgatacccgtgtgcaaacagctattcctatgcaaaatgtagcagaaccttatattcgcggacgtgccttgcgccatctagaaaaaaatcggattgttgtttttggagctggtattggctcgccttatttttcaacagacaccaccgcggcactgcgtgctgctgagattgaagcagatgctattttaatggcaaaaaatggtgtggatggggtctataatgctgatcctaaaaaagatgctaatgcggttaaatttgatgaattaacacatggtgaagtgatcaaacgtggtctcaaaatcatggatgcaacggcatcgaccttatcgatggataacgatattgatttggtggttttcaatatgaatgaagctggcaatattcaacgtgttgtctttggagaacatattggaactactgtatcaaataaagtttgtgactaa

SEQ ID NO: 576 - protein, 242 aa, Streptococcus pyogenes
MEPKYQRILIKLSGEALAGEKGVGIDIPTVQAIAKEIAEVHVSGVQIALVIGGGNLWRGEPAADAGMDRVQADYTGMLGTVMNALVMADSLQHYGVDTRVQTAIPMQNVAEPYIRGRALRHLEKNRIVVFGAGIGSPYFSTDTTAALRAAEIEADAILMAKNGVDGVYNADPKKDANAVKFDELTHGEVIKRGLKIMDATASTLSMDNDIDLVVFNMNEAGNIQRVVFGEHIGTTVSNKVCD

SEQ ID NO: 577 - DNA, 846 bp, Streptococcus pyogenes
ttggacatcagtatcgaatttggcttatatcctactgaatctgacttaacagagcttcaacaatacttcccagatactaatctcaaaaaattatatgaagttgaagcttaccacaaaaaattggaaactattttagattccgaattctcaactgaacgtgaatccctaatagctgagatcgacgaattagagagtcaattaacaactctaaaccaagaacttcaagaactaggaaacatcccaaatctttcaagtgagtacttagaaaactattctaaactaacagctacaatcaatgcactaaaagaacaaaacgaggcctacttaaaggagtctggtctatccaaagaaaaatcagaaacggacgctgacttgaaacgcagtacagaagatatccttctagatctagaagtaaaaatcaacagtaagatgcgtgaagtcaataacattctatatccagatattcgcaaagctcctcaaattaacctaaatgctcacaatagctactccttctatacaccagatgatgatggtacaggaactaagtttaaagggatgattgtattcgacttagtaatgctctaccttactaatctgccagcactcgcacacgattcattactcttgagtaatgttagctaccaagcgactgaagcacttttgaagctatatgaccagtcaaggtcattgaacaaacaagtctttttagtcttcgataaagccagctcttattctccagatgctaatcaactcttgtcagaaaatacggtattgagactctctagtaacggaaatgaactctacggtatttcatggaacaaaggagaaaactcagatgagatttag

SEQ ID NO: 578 - protein, 281 aa, Streptococcus pyogenes
MDISIEFGLYPTESDLTELQQYFPDTNLKKLYEVEAYHKKLETILDSEFSTERESLIAEIDELESQLTTLNQELQELGNIPNLSSEYLENYSKLTATINALKEQNEAYLKESGLSKEKSETDADLKRSTEDILLDLEVKINSKMREVNNILYPDIRKAPQINLNAHNSYSFYTPDDDGTGTKFKGMIVFDLVMLYLTNLPALAHDSLLLSNVSYQATEALLKLYDQSRSLNKQVFLVFDKASSYSPDANQLLSENTVLRLSSNGNELYGISWNKGENSDEI

SEQ ID NO: 579 - DNA, 699 bp, Streptococcus pyogenes
ttgccatttattttccgctactctttttttaacaaagtcttgattttttggtacactatccttatgaaaatctataaaacaataaaccacattgctggtgaaaatacttattacctcgttaatgatcaagctgttatcctcattgatccaggaagtaacggccaagaaatcattgctaaaattaaatcctttgaaaaacctttagtggctatcctcttaacgcatactcactatgatcatatttttagtttagatttggtcagagatgcttttgatcatccacctgtttatgtttcagaaaaagaagccgcttggctatcttccccagatgataatttatcgggcttaggccgtcatgatgatatcattactgttatagcaagaccggcagagaacttttttaaattaaagcaaccctatcaactaaatggttttgaattcacagttttaccaacatctggtcattcttggggaggagtctcatttgttttccactcagatgaattagtcgttactggcgatgctctatttcgtgaaactatcggtcgtactgacttacctaccagtaactttgaggacctcattactggtattcgccaagaactattcaccttacctaatcattaccgagtttatcctgggcatggtccttctactaccatttgtcacgaaaaaaatgctaaccccttttttcattga

SEQ ID NO: 580 - protein, 232 aa, Streptococcus pyogenes
MPFIFRYSFFNKVLIFWYTILMKIYKTINHIAGENTYYLVNDQAVILIDPGSNGQEIIAKIKSFEKPLVAILLTHTHYDHIFSLDLVRDAFDHPPVYVSEKEAAWLSSPDDNLSGLGRHDDIITVIARPAENFFKLKQPYQLNGFEFTVLPTSGHSWGGVSFVFHSDELVVTGDALFRETIGRTDLPTSNFEDLITGIRQELFTLPNHYRVYPGHGPSTTICHEKNANPFFH

SEQ ID NO: 581 - DNA, 696 bp, Streptococcus pyogenes
gtgaaaaagttaatcattattcctgcttacaatgaaagcagtaatattgtcaatactatacgtactattgaatcagatgccccggattttgactatatcattattgatgattgctcaacggataatacgttagcaatatgtcaaaaacaggggttcaatgttatttctttgcccattaacctgggaattggcggtgcggtgcaaactggctatcgttatgcacaaagatgtggatatgacgttgcagttcaagtagatggagatggtcagcacaatccatgctatttggaaaaaatggttgaggtattagttcaatcttcagtaaatatggtaattggatcacgatttatcacaaaagaagggtttcagtcatcatttgctcgacgtatcggcataaagtattttacttggcttattgcgctactaacaggaaaaaaaataacagatgcaacgtcaggtctaaggttaattgaccgttcattgattgaacgttttgctaatcattatccagatgattatcctgaacctgaaacagttgttgatgtattggttagtcattttaaagtgaaagaaattcctgttgtaatgaatgagcgacaaggcggtgtgtcatctatctcgttgacgaaatcggtctattatatgattaaagtgactttagctattttagttgttagattgaaaggaaatcgttaa

SEQ ID NO: 582 - protein, 231 aa, Streptococcus pyogenes
MKKLIIIPAYNESSNIVNTIRTIESDAPDFDYIIIDDCSTDNTLAICQKQGFNVISLPINLGIGGAVQTGYRYAQRCGYDVAVQVDGDGQHNPCYLEKMVEVLVQSSVNMVIGSRFITKEGFQSSFARRIGIKYFTWLIALLTGKKITDATSGLRLIDRSLIERFANHYPDDYPEPETVVDVLVSHFKVKEIPVVMNERQGGVSSISLTKSVYYMIKVTLAILVVRLKGNR

SEQ ID NO: 583 - DNA, 765 bp, Streptococcus pyogenes
gtgccttataagggttatttaattgatttagacggaacgatttaccaagggaaaaaccgtattccagcaggggagcggtttatcaaacgcctacaagaaagaggcattccctatttattagtgactaataataccacaagaacacccgaaatggtgcaaagcatgctggctaatcagtttcatgttgagacaagcattgagaccatttatacggctaccatggcaaccgtcgattacatgaatgacatgaaccgtggcaagacagcttacgttattggagaaacagggctcaaatcagctattgcagcagcaggttacgtagaagaacttgagaatcccgcttacgtggtggttggtttagacagtcaggtgacctatgagatgttggctatagccaccttggctattcaaaaaggtgccctctttattgggacaaatcctgatttaaacattccaaccgaacgtggtttgatgccaggagcaggtgcattgaatgccttactagaagctgccacacgtgtaaaacctgtttttattggcaagcccaacgctatcattatgaataaatcactagaggtattgggcattcagcgctctgaggctgtcatggttggcgataattacttgactgatatcatggcaggtattcaaaatgatattgcaacgatcctcgtgacaacaggctttaccagacctgaagaggtaccaaccttaccaattcagccagatcatgtcctatccagccttgatgagtggaggttgtga

SEQ ID NO: 584 - protein, 254 aa, Streptococcus pyogenes
MPYKGYLIDLDGTIYQGKNRIPAGERFIKRLQERGIPYLLVTNNTTRTPEMVQSMLANQFHVETSIETIYTATMATVDYMNDMNRGKTAYVIGETGLKSAIAAAGYVEELENPAYVVVGLDSQVTYEMLAIATLAIQKGALFIGTNPDLNIPTERGLMPGAGALNALLEAATRVKPVFIGKPNAIIMNKSLEVLGIQRSEAVMVGDNYLTDIMAGIQNDIATILVTTGFTRPEEVPTLPIQPDHVLSSLDEWRL

SEQ ID NO: 585 - DNA, 837 bp, Streptococcus pyogenes
gtgaatcattttgaactttataagctaaagaaagctggactgactaataaaaacattctcaatattcttgactaccaaaaacaccaggaaaaatcgttgtcacttcgagatatggccgttgtttctggttgtaagcatccgtctcactttatagaagcctataagcagttagatattcaaaatttaaaaatggaatttaaacaatttcctagtatttctatcttagataagcattacccaatggcattgaaagaaatatacaatccacctgtcctcttgttttttcagggaaatttagaccttcttgagaaacctaaattagccattgtcggctccagacgctcaagcgataccggagtaaagtctgtccgtaaaattcttaaagaactcgggaaccgttttgtgattgttagcggacttgctcgaggtatcgacactagtgctcatttagcctgccttaaaaatgggggacaaactatcgctattattggaacaggattggatcgcttttaccctaaagaaaatagggagttgcaaactttcttagggaaaaatcatcttgtgctaacagaatacggtccaggagaagaagctttatcttatcactttccagaacggaatcgtattatcgcaggccttagccgaggtattcttgtcgttgaagcaaaaaatcgttcaggttccttgattacttgtcaaattgggatagaagaaggccgagacatttttgctgtcccaggaaacattttggacgggaaatccgaaggttgccttcagttaattaaagagggagcaacatgcgtcacatcgggcatggatatcctttcagagtactaa

SEQ ID NO: 586 - protein, 278 aa, Streptococcus pyogenes
MNHFELYKLKKAGLTNKNILNILDYQKHQEKSLSLRDMAVVSGCKHPSHFIEAYKQLDIQNLKMEFKQFPSISILDKHYPMALKEIYNPPVLLFFQGNLDLLEKPKLAIVGSRRSSDTGVKSVRKILKELGNRFVIVSGLARGIDTSAHLACLKNGGQTIAIIGTGLDRFYPKENRELQTFLGKNHLVLTEYGPGEEALSYHFPERNRIIAGLSRGILVVEAKNRSGSLITCQIGIEEGRDIFAVPGNILDGKSEGCLQLIKEGATCVTSGMDILSEY

SEQ ID NO: 587 - DNA, 852 bp, Streptococcus pyogenes
gtgaaaggaagaattgtgataactattagagatttagcgtcactgccgatttttgtttacggtgatggaaataaaaaagttccaggagctttgagtccttttgtgtggacagaggtgtttttaaaaactatcaatcaagaacctaatcaactgatcttacatatttggccgatgacaagaacagttatattaggaatgttagatagacagcttccctactttgagctggctaaaacagagattggcaataatggttatgttcctgttactcgtaatattggcggtttggctgttgtcgctgatgatgggattttgaatttttcgcttgttattccagaccatttttcggaatctatcagtattagtaatgcttatttaataatggttgatgtcattagagagagtttttcggattattatcagcgtattgaatatcacgaaattaaaaattcttattgccctggtaattttgatcttagtattgcaggccgcaagtttgcaggtatcgcccagcgtcgtatcaaaaagggaattgttgtgtctatttacttgagcgtttgtggggatcaagcagcgcgtggtcaactcatcaaggatttttatgaggccggaacacaaggagaagttaccaaggttaattaccctcaaattgatccagaatgcatggcaactctttcagaactccttgagacgccttttacagtggcagaagtccttgaacgtcttcgattgaccttgcgacagcttggcttttccctcacggaaaaaagtccagatcaagccttactgactaattttgatgctgtctatgaacggatgcagctagaagtcgtcagaaaggaaggcaaatga

SEQ ID NO: 588 - protein, 283 aa, Streptococcus pyogenes
MKGRIVITIRDLASLPIFVYGDGNKKVPGALSPFVWTEVFLKTINQEPNQLILHIWPMTRTVILGMLDRQLPYFELAKTEIGNNGYVPVTRNIGGLAVVADDGILNFSLVIPDHFSESISISNAYLIMVDVIRESFSDYYQRIEYHEIKNSYCPGNFDLSIAGRKFAGIAQRRIKKGIVVSIYLSVCGDQAARGQLIKDFYEAGTQGEVTKVNYPQIDPECMATLSELLETPFTVAEVLERLRLTLRQLGFSLTEKSPDQALLTNFDAVYERMQLEVVRKEGK

SEQ ID NO: 589 - DNA, 810 bp, Streptococcus pyogenes
gtgaaacaaatcactcaacagaaatggttacgatacggtctttttattgctttagttttaaatggtattgaacttgaattgttaggactgactgctaacaacctttcctttaaagaagcttttgctctaatactaaccattagtctattaggcatttacttaattccatttgcagcagctattttttatttaagtaaaaaatttcatatgaacctgaacgttattattgttagctgtcttagcggactttatatttcaggttttttagcttcttgtgggaaccatctcgtaggacaattttggtcatacatcatcccttctaaagacgctttaaagctttggggagatgctttaactgcccctattgtcgaagagcccattaaggcttcttcggctattttagtaattactttatttcctagacttactcttaaagaaaaattagttgttgctttactttctggcatgggctttcaactaacagaagatatccgttatttgattcaagcaaaatctatagatagtctcgtaccgactgctattgaacgtattagcactgctgtgacttcacattgggtacatacagctatttttaccattggagcatacttattattaaagggttctaaccttttttcaaaacagcaacaaattttctggttattaagtcctctggttctacatttcatctggaactctcctctaacaagcattcctggcatgacagttttactaggaacattaatccttttaatctttggtgatctttttcaaaaaatcaacacccttgacgatgatgtgcttttttaa

SEQ ID NO: 590 - protein, 269 aa, Streptococcus pyogenes
MKQITQQKWLRYGLFIALVLNGIELELLGLTANNLSFKEAFALILTISLLGIYLIPFAAAIFYLSKKFHMNLNVIIVSCLSGLYISGFLASCGNHLVGQFWSYIIPSKDALKLWGDALTAPIVEEPIKASSAILVITLFPRLTLKEKLVVALLSGMGFQLTEDIRYLIQAKSIDSLVPTAIERISTAVTSHWVHTAIFTIGAYLLLKGSNLFSKQQQIFWLLSPLVLHFIWNSPLTSIPGMTVLLGTLILLIFGDLFQKINTLDDDVLF

SEQ ID NO: 591 - DNA, 819 bp, Streptococcus pyogenes
ttgaagagtgattttgactttcgaaaagtcagctttcgtgatacaataagtaagattattctattaaaggagaagcctgtgttttacgcttacttacgcggtttagtagtctttttattatgggttgtcaatggcaatgcccactaccatcatgaagaaaagatgttagatgcttctgagaattatattctggtagcaccccatcgaaccttttgggatccagtttacatggcatttgcagcacgtcctaagcagtttatttttatggctaaaaaagagttgtttgcaaatcgtctctttgcttggtggattaaaatgtgtggtgcttttcctattgatcgtgacaaaccgagtccagatgctattcgttaccctgttaatatgctcaaaaagagcaatcgttctcttcttatgtttccaagtggaagtaggcattcgcaagaggtcaaaggaggggtcgctgtgattgctaaattggctaaggtcaagattatgccagcagcctatcaggggcctatgtcggtcaagggattactagcgggagaacgggttgacatgacttttgggaatcccattgacgtctcagatattaaacgcatgaatgatgaagggattgctgaggtggcaaaccgtattcaggcagagtttgatcggattgatgacgagttggcacctttccaaccaggcaaagcaaggaaccctttaacttatctctaccgtttaccattaggattggttttggtggtggtattattattaaccatgttattttcctatattgctagttttgtttggaatccagataaacatcgccattaa

SEQ ID NO: 592 - protein, 272 aa, Streptococcus pyogenes
MKSDFDFRKVSFRDTISKIILLKEKPVFYAYLRGLVVFLLWVVNGNAHYHHEEKMLDASENYILVAPHRTFWDPVYMAFAARPKQFIFMAKKELFANRLFAWWIKMCGAFPIDRDKPSPDAIRYPVNMLKKSNRSLLMFPSGSRHSQEVKGGVAVIAKLAKVKIMPAAYQGPMSVKGLLAGERVDMTFGNPIDVSDIKRMNDEGIAEVANRIQAEFDRIDDELAPFQPGKARNPLTYLYRLPLGLVLVVVLLLTMLFSYIASFVWNPDKHRH

SEQ ID NO: 593 - DNA, 681 bp, Streptococcus pyogenes
gtgattcgaagagaagattatcaataccttagaaaactaaacgattttcgctacttttctattgaacaatttgacaaaattgtagggcagatggaattccgaaaagctaaaaaggaccatatccttttttttgagggagataaaagagataagctttttctagtgacctctggttatttcaaggtggagcagtccgatcaatcaggaaccttcatgtatacggatttcatcagacacggcaccatttttccttacggtggcctctttacagatgattattaccatttttcagtggtagccatgacagacgtgacttatttttactttccagtcgatttatttgaagattattcgcttgaaaatcgtctacaaatgaaacacttatatagtaagatgtctaagctgctcgagttacatgagttgagggtccgaaacttgattacatcaagtgctagttctcgtgtgattcaatctctggcgattttgctggttgaaatgggtaaagacagtgataccttaccttttcaattaacaacaacagatattgctcaaataagtgggacgacaagagaaacagttagccatgtgcttagagatttgaagaagcaagaattgattaccataaaaggtaagtatttgacttatctagataaagactattttttacaatacacaaagtga

SEQ ID NO: 594 - protein, 226 aa, Streptococcus pyogenes
MIRREDYQYLRKLNDFRYFSIEQFDKIVGQMEFRKAKKDHILFFEGDKRDKLFLVTSGYFKVEQSDQSGTFMYTDFIRHGTIFPYGGLFTDDYYHFSVVAMTDVTYFYFPVDLFEDYSLENRLQMKHLYSKMSKLLELHELRVRNLITSSASSRVIQSLAILLVEMGKDSDTLPFQLTTTDIAQISGTTRETVSHVLRDLKKQELITIKGKYLTYLDKDYFLQYTK

SEQ ID NO: 595 - DNA, 741 bp, Streptococcus pyogenes
gtgtactcattgttaattgtagaagacgaataccttgtgcgccagggtattcgttctttggttgattttagccagttcaagattgatcgggtcaacgaagcagaaaatggccagttggcttgggacttgtttcagaaagagccttatgatattgttttgacggatatcaatatgcccaaattaaatgggattcaactagcagaactcattaaacaggaatccccccaaactcatctggtatttttgacgggctacgatgattttaactatgccttatctgctttgaaattaggggcagatgattacttgctcaaacccttttccaaggcagatgtagaagacatgttaggaaagctccggaaaaaattagaactttccaagaaaacagaaaccattcaggaattggttgagcagcctcaaaaagaagtatcagcaatagcaatggctattcatgagcggttggcagattctgatttgaccctaaaaagcttggctcagcagcttggttttagccctaattaccttagcgtcttgattaaaaaagagttagggatgccctttcaagattatctggtacaagaacggttgaaaaaagccaagcttctcttgttaaccagtaatcttaaaatctatgaaattgcagagcaggtcggttttgaggacatgaattatttttctcagcgctttaagcaactggtaggcgttaccccaagtcagtataaaaaaggaggccaggcatga

SEQ ID NO: 596 - protein, 246 aa, Streptococcus pyogenes
MYSLLIVEDEYLVRQGIRSLVDFSQFKIDRVNEAENGQLAWDLFQKEPYDIVLTDINMPKLNGIQLAELIKQESPQTHLVFLTGYDDFNYALSALKLGADDYLLKPFSKADVEDMLGKLRKKLELSKKTETIQELVEQPQKEVSAIAMAIHERLADSDLTLKSLAQQLGFSPNYLSVLIKKELGMPFQDYLVQERLKKAKLLLLTSNLKIYEIAEQVGFEDMNYFSQRFKQLVGVTPSQYKKGGQA

SEQ ID NO: 597 - DNA, 729 bp, Streptococcus pyogenes
ttgtacagatctagagacttctacgtgagagtaagtggtcagcgagctctttttacaaatccagccacaaaagggggatcggaacgctcatcctattcggttccgactagacaggcactgaatggtatcgttgatgccatctattataagccgacctttactaatatcgtcacagaggttaaggttattaaccagattcaaaccgaattacagggtgtcagggctctgttacatgattatagtgcagatttaagttatgtatcctatttgagtgatgttgtttatctgatcaagtttcattttgtttggaatgaagatagaaaagatttgaactcagatagacttccagctaaacatgaagccattatggagcgttctattcgtaaagggggacgtcgagatgtgtttttgggtacaagagaatgtttagggcttgtagatgatatcagccaagaagagtatgagactactgtgtcgtattataatggtgtcaatatcgacttgggaatcatgttccattcctttgcctatccgaaggacaaaaagacaccattaaaatcatactttacaaagactgtgatgaaaaatggagtcattacgtttaaagcacagtctgaatgcgatattgttaacacgctttctagttatgcttttaaagcaccagaggagataaaatcggttaacgatgaatgcatggagtatgatgccatggagaaaggagaaaactga

SEQ ID NO: 598 - protein, 242 aa, Streptococcus pyogenes
MYRSRDFYVRVSGQRALFTNPATKGGSERSSYSVPTRQALNGIVDAIYYKPTFTNIVTEVKVINQIQTELQGVRALLHDYSADLSYVSYLSDVVYLIKFHFVWNEDRKDLNSDRLPAKHEAIMERSIRKGGRRDVFLGTRECLGLVDDISQEEYETTVSYYNGVNIDLGIMFHSFAYPKDKKTPLKSYFTKTVMKNGVITFKAQSECDIVNTLSSYAFKAPEEIKSVNDECMEYDAMEKGEN

SEQ ID NO: 599 - DNA, 792 bp, Streptococcus pyogenes
gtgacaacgacggaacaagaacttaccttgactcccttacgtgggaaaagtggcaaagcttataaaggcacttatccaaatggggaatgtgtctttataaaattaaatacgacccctattctacctgccttagcaaaagaacagattgcgccacagttactttgggccaaacgcatgggcaatggtgatatgatgagtgcccaagaatggcttaacggccgtacattgaccaaagaagatatgaacagtaagcaaatcattcatattctattgcgccttcacaaatctaaaaaattagtcaatcaactgcttcagctcaattataagattgaaaacccatacgatttattggttgattttgagcaaaatgcacccttgcaaattcagcaaaattcatacttacaagctatcgttaaagaattaaaacggagcttaccagagttcaaatcagaagtagcaacgattgtgcatggagatattaaacatagcaattgggtgattactactagtggtatgatttttttagtagattgggattctgttcgtctaactgatcggatgtatgatgttgcttacctgttgagccactatattccacggtctcgttggtcagaatggctgtcttattatggctataaaaataatgacaaggttatgcaaaaaattatttggtatggtcaattttctcacctgacacaaattctcaagtgttttgacaagcgtgacatggagcatgtgaatcaggagatttatgccctcagaaaatttagagaaatatttagaaagaaataa

SEQ ID NO: 600 - protein, 263 aa, Streptococcus pyogenes
MTTTEQELTLTPLRGKSGKAYKGTYPNGECVFIKLNTTPILPALAKEQIAPQLLWAKRMGNGDMMSAQEWLNGRTLTKEDMNSKQIIHILLRLHKSKKLVNQLLQLNYKIENPYDLLVDFEQNAPLQIQQNSYLQAIVKELKRSLPEFKSEVATIVHGDIKHSNWVITTSGMIFLVDWDSVRLTDRMYDVAYLLSHYIPRSRWSEWLSYYGYKNNDKVMQKIIWYGQFSHLTQILKCFDKRDMEHVNQEIYALRKFREIFRKK

SEQ ID NO: 601 - DNA, 672 bp, Streptococcus pyogenes
gtggaagtaaaagatattttaaaaacggtagaccatactttgctagcaacaacagcaacgtggccagaaatccaaacaattttagatgatgccatggcttatgaaacagcttcagcatgtattccagcttcttacgtcaaaaaagcagcagaatacgtttcaggtaaattagctatttgtactgttattgggttcccaaatggctatagtacaactgcggcgaaggtttttgaatgtcaagatgctattcaaaatggtgctgatgaaattgacatggtcattaatttgacagacgttaaaaatggggattttgatactgttgaagaagaaattcgtcaaatcaaagctaaatgtcaagaccatatcttaaaagttatcgttgagacatgtcaattaactaaagaagaacttatcgaactttgtggagttgtcacacgttcaggtgcagactttattaaaacctctactggtttttcgacagcaggtgctacatttgaagatgttgaagtgatggcaaaatatgtcggcgaaggtgttaaaattaaggcagcaggtggaatctcatcattggaagatgctaaaacatttattgctttaggagcttcacgcttgggtactagccgtatcatcaagattgttaagaacgaagctacaaaaaccgatagctattaa

SEQ ID NO: 602 - protein, 223 aa, Streptococcus pyogenes
MEVKDILKTVDHTLLATTATWPEIQTILDDAMAYETASACIPASYVKKAAEYVSGKLAICTVIGFPNGYSTTAAKVFECQDAIQNGADEIDMVINLTDVKNGDFDTVEEEIRQIKAKCQDHILKVIVETCQLTKEELIELCGVVTRSGADFIKTSTGFSTAGATFEDVEVMAKYVGEGVKIKAAGGISSLEDAKTFIALGASRLGTSRIIKIVKNEATKTDSY

SEQ ID NO: 603 - DNA, 675 bp, Streptococcus pyogenes
ttgttaaaccttaaagatattcgaaaaagctatcatcttggaactgaagaatttgcgattttaaaaggaatcgatttagaagttaacgagggtgactttttagccatcatgggaccatcaggttcgggaaagtcaacattgatgaatatcattgggtgtttagataagcctggctctggctcatatgccattgaaggcagagacgtgtcatccttatctgataatgaacttgctgatttgcgtaatcaaaaaatcggctttgtttttcaaaattttaacctgatgcccaagctaacagcttgtcaaaatgtcgaattacccttgacttatatgaatgttcctaaaaaagagcgtcgcaaacgagccctagagatgttaaagctagtaggactagaagaacgtagtgaatttaaaccgatggagctatctggtgggcaaaaacagcgtgtagcgattgcaagagctttagtcactaacccgagttttatccttggtgatgagccaacaggtgcactagacacaaaaaccagcgtccaaatcatggacctatttaaacaattcaatgataacggcaaaacgattattatcatcacacacgagcctgaagtagctgccctatgcaaaaagacggtgatcctaagagatggtaatatagaacattccgatatagagtaa

SEQ ID NO: 604 - protein, 224 aa, Streptococcus pyogenes
MLNLKDIRKSYHLGTEEFAILKGIDLEVNEGDFLAIMGPSGSGKSTLMNIIGCLDKPGSGSYAIEGRDVSSLSDNELADLRNQKIGFVFQNFNLMPKLTACQNVELPLTYMNVPKKERRKRALEMLKLVGLEERSEFKPMELSGGQKQRVAIARALVTNPSFILGDEPTGALDTKTSVQIMDLFKQFNDNGKTIIIITHEPEVAALCKKTVILRDGNIEHSDIE

SEQ ID NO: 605 - DNA, 753 bp, Streptococcus pyogenes
ttggcgattcctgatttagataaattttcatctaacttacaacaggggaaaattcctgtcataaagcacttcgaactcaatttagataaggggagtcactgggctattgctggaaattcaggttctgggaaaccgtacgctctcacttacttcttgagtgtcctgaaacctaagtccggcctaattatcattgacccaaaattcgatacccctagccaatgggcaagagaaaataaaattgccgttatccacccagtagaaaaccattcaaaatctgatttcgtttcacaagtcaatgaacaattaaaccagtgtgcaactctcattcagaaacgacaagctatcttgtatgataatcccaatcatcaatttacccatctaactattgttattgatgaagtcctcgctctatcagagggagtcaataagaatatcaaagaagcttttttctccctactatcacaaattgccttgttgggacatgctactaaaatccatctattcttgggaagccagcgttttgaccataacactattcccatttcagtgagggaacagctaaacgtattattgcaaattggaaatatcaatcagaaaaccactcaattcttatttccagacctagatccagagggaattgtcattccaacaggacacggaacaggtatcattcaagttgtcgataatgaacactcctatcaagttctacccttactctgtccaacctactatactaagcgaggtatcctatga

SEQ ID NO: 606 - protein, 250 aa, Streptococcus pyogenes
MAIPDLDKFSSNLQQGKIPVIKHFELNLDKGSHWAIAGNSGSGKPYALTYFLSVLKPKSGLIIIDPKFDTPSQWARENKIAVIHPVENHSKSDFVSQVNEQLNQCATLIQKRQAILYDNPNHQFTHLTIVIDEVLALSEGVNKNIKEAFFSLLSQIALLGHATKIHLFLGSQRFDHNTIPISVREQLNVLLQIGNINQKTTQFLFPDLDPEGIVIPTGHGTGIIQVVDNEHSYQVLPLLCPTYYTKRGIL

SEQ ID NO: 607 - DNA, 978 bp, Streptococcus pyogenes
gtgataaagcttaattcttcctttaggattggtgatgtggaaatccctcaccgcactgtccttgctcccatggctggcgtgaccaattctgcctttcgtaccatcgccaaagaatttggtgctggtttggtggttatggaaatgatttccgaaaaagggcttctttacaacaatgaaaagacccttcacatgctccatattgatgaaaatgagcaccctatgtccattcaattatttggtggtgacgcagaagggttgaaacgtgcagctgatttcattcaaaccaataccaaggccgatattgttgatattaatatgggctgccctgttaataaagttgtcaaaaacgaggctggtgccaagtggctccgtgaccctgataagatttaccacattgtcaaggaagtcacgtctgttttagatattccactgactgtcaaaatgcgtacaggttgggcggatagttcacttgctgttgaaaatgcccttgccgctgagtcggcaggtgtatctgctcttgccatgcacggtcgtacccgtgaacaaatgtatacaggaacctgcgaccatgagacattagcccgagtttctaaggctatcactaagattccctttattggaaatggggacgtgcgttcggtgcaagacgccaaatttatgattgaagaaatcggtgtagatgccgtgatgattggccgcgcagccatgaacaatccttatctttttacccaaatcaatcatttctttgaaactggtcaagaattgccagatcttccctttgccaaaaaattagacatcgccaaagaccaccttaaacgcctgattaacctcaaaggtgaaaccattgctgttcgggaatttcggggcttagcaccacactatcttcgcggaacagcaggtgctgccaaagttcgtggtgctgtttcacgcgctgagactctagctgaggttgaagccatcttcgaaacagtacgctaa

SEQ ID NO: 608 - protein, 325 aa, Streptococcus pyogenes
MIKLNSSFRIGDVEIPHRTVLAPMAGVTNSAFRTIAKEFGAGLVVMEMISEKGLLYNNEKTLHMLHIDENEHPMSIQLFGGDAEGLKRAADFIQTNTKADIVDINMGCPVNKVVKNEAGAKWLRDPDKIYHIVKEVTSVLDIPLTVKMRTGWADSSLAVENALAAESAGVSALAMHGRTREQMYTGTCDHETLARVSKAITKIPFIGNGDVRSVQDAKFMIEEIGVDAVMIGRAAMNNPYLFTQINHFFETGQELPDLPFAKKLDIAKDHLKRLINLKGETIAVREFRGLAPHYLRGTAGAAKVRGAVSRAETLAEVEAIFETVR

SEQ ID NO: 609 - DNA, 921 bp, Streptococcus pyogenes
ttgtgtctcgagcgtttttgcttaaaaaaaacgcagataatcactaagtcacatatcttttggcttgtctttgtgctacttagttttagcttatgtgttgctatttactgtcatctgcgctttggagccgttgctttatcacatcaggatcttaactctattttatttggaaagcaaaacggccataaagccaatgttttactcgctatacgattaccgagactttttggtgctaccttaactggctctgcgttagctgtttctggaactatcatgcaagcaatcacacgtaatcctatcgctgagcctggccttttaggcattaatgctggagcaggactagccttggtactggcttatgcgtttgtacctcacttgcactattccctcattattctgctttcgttgttagggtctagcctggcagcaaccttagtctttggcctttcttatcaatctggcaaaggctaccatcagctccgccttgtcttagcaggagctatggtttccatactgctatcagcattaggtcaaggtattaccaattactatcatctggcaaatgctgttatcggctggcaagcaggaggtcttgtcggggtcaattggcaaatgatcggctatattgctcctcttattattcttagtctttgtttagcccagctattatcttatcacctgaccgtccttagtctaagtgagtctcaggcaaaagctcttgggcaaaaaaccaacttgatcagtgcagtctttatgattttggttcttattttatcatcagcagctgtagccattgctggaagcatttcttttatcggcttagtcattcctcatcttatgaaacattttacacctcatcattaccgataccttttgccgctttgtgcagtttctggcgctagtttcaatggtatgggttga

SEQ ID NO: 610 - protein, 306 aa, Streptococcus pyogenes
MCLERFCLKKTQIITKSHIFWLVFVLLSFSLCVAIYCHLRFGAVALSHQDLNSILFGKQNGHKANVLLAIRLPRLFGATLTGSALAVSGTIMQAITRNPIAEPGLLGINAGAGLALVLAYAFVPHLHYSLIILLSLLGSSLAATLVFGLSYQSGKGYHQLRLVLAGAMVSILLSALGQGITNYYHLANAVIGWQAGGLVGVNWQMIGYIAPLIILSLCLAQLLSYHLTVLSLSESQAKALGQKTNLISAVFMILVLILSSAAVAIAGSISFIGLVIPHLMKHFTPHHYRYLLPLCAVSGASFNGMG

SEQ ID NO: 611 - DNA, 897 bp, Streptococcus pyogenes
ttggatattaaacaaattcgttattttatcgcaatcgttgaaaatcattttaacttgagccaggcggcggaactgttgtatgtgtcgcagccgacacttagcatgatgatcaatgattttgaaaaaagagaaaatgttaagctcttcaaacgaaaaagaggtcgtattattgggttaacctatcttggtgataattattataaggacgctcaaaaggttctcagtctctatgatgacatgtttttgaaattgcatgatcacagtaaagggttaaagggaagtatcaatattggtattcctcctcttattttatcagttgttttctcagaagtaatgccaaaactgattttagaaaatccggggattcaattcaatgttaaggagattggtgcttaccaactaaaaaatgaactactcgtgggaaatgttgacgtcgcagtcttgttatccccaacaggcatcgctgataatttggttgagacttatgaaatccagagatcagaattatctgtatgcctgtctccacgccatcgtttagcttccaaaaaagttattcagtgggaagatttaacagatgaacaacttgccctatttgatcctagtttcatggttcaccatttagtgcttgaagcttgcgagcgtcaccaagtcagacctaatattattttgacgtcctcttcctgggattttatgcttaattctaccaagattaatcacaacgtcttaactatttgtcccaaacctattacagaattataccaattaaaggacattaagtgtattccaatggaacgtcccatttcttggcgtgttgtcttaacacgcctccggaaaaaaagttattctgaaatagaagcctacatcatggacgacttgctacagtctttttttaagtag

SEQ ID NO: 612 - protein, 298 aa, Streptococcus pyogenes
MDIKQIRYFIAIVENHFNLSQAAELLYVSQPTLSMMINDFEKRENVKLFKRKRGRIIGLTYLGDNYYKDAQKVLSLYDDMFLKLHDHSKGLKGSINIGIPPLILSVVFSEVMPKLILENPGIQFNVKEIGAYQLKNELLVGNVDVAVLLSPTGIADNLVETYEIQRSELSVCLSPRHRLASKKVIQWEDLTDEQLALFDPSFMVHHLVLEACERHQVRPNIILTSSSWDFMLNSTKINHNVLTICPKPITELYQLKDIKCIPMERPISWRVVLTRLRKKSYSEIEAYIMDDLLQSFFK

SEQ ID NO: 613 - DNA, 873 bp, Streptococcus pyogenes
ttgcaaggtaaaatcattaaatctctggctggtttttattacgtggagtcagaaggacaggtatatcagacgcgagcgcgtggtaattttaggaagcgcggtgagacaccttatgttggagatatcgtggatttctcagcagaggacaactctgaaggttatattttagcgattcatcctcgtaaaaacagtttggtaagacctcctatcgtcaatattgatcaagcagtggttattatgtctgctaaagaaccagaatttaacagcaatcttctagaccgctttctcatcttgcttgaacacaaagccattcatccagtggtttatatctctaagatggacttattagatagtcccgaggagattaaggctattggtcgacagtatcaggcaatcggttacgattttgtgaccagtcttgaggaattgctgcctttgctagctgataaaattaccgtctttatgggacaaacaggtgttgggaaatcaacccttctcaaccgaatcgcccccgaattggctcttgaaataggagaaatctcagatagtctagggcgtggtcgtcacaccacccgagctgtgagtttttacaatacccatggcggaaaaatcgcggatacgccaggtttttcatcattagactatgatattgctaatgctgaagatttgaacgaggcttttccagagctgcgccggctgagccatgagtgtaagtttagatcctgtacccatacccacgaacccaagtgtgctgtcaaggcagcgcttgaaacgggagagttgtggccagttcgttatgagcattacctgcaatttctcagtgaaattgaaaaccgtcgtgaaacatataaaaaagttatcaaaagaaagtag

SEQ ID NO: 614 - protein, 290 aa, Streptococcus pyogenes
MQGKIIKSLAGFYYVESEGQVYQTRARGNFRKRGETPYVGDIVDFSAEDNSEGYILAIHPRKNSLVRPPIVNIDQAVVIMSAKEPEFNSNLLDRFLILLEHKAIHPVVYISKMDLLDSPEEIKAIGRQYQAIGYDFVTSLEELLPLLADKITVFMGQTGVGKSTLLNRIAPELALEIGEISDSLGRGRHTTRAVSFYNTHGGKIADTPGFSSLDYDIANAEDLNEAFPELRRLSHECKFRSCTHTHEPKCAVKAALETGELWPVRYEHYLQFLSEIENRRETYKKVIKRK

SEQ ID NO: 615 - DNA, 924 bp, Streptococcus pyogenes
ttgaaactaacattaaatcgcatcctcttttcaggactagcactgtcaattctactcaccttgacaggctgtgtgggaagagacgctcacggaaatcccaaaggtatgatttgggaatttcttggaaaacccatgtcatactttatcgattactttgcaaacaatgctggactaggttatggactggctatcatcatcgtaaccattattgttagaacacttatcttaccactaggtctatatcaatcttggaaagcaagttatcaatctgagaaaatggccttcttgaaacctgtttttgaaccaatcaacaaacgtatcaaacaggcaaatagtcaggaagaaaaaatggctgcccaaacagaattaatggctgctcagcgtgctcatgggattaaccctcttggaggtattggatgtctacctcttctcatccagatgccattcttttctgccatgtattttgccgctcaatacactaaaggagtatcaacaagcacctttatgggtattgatcttggtagccgtagtttagtgttaacagcaattatcgctgctctttacttcttccaatcatggttatcaatgatggccgtttcagaagaacaacgtgagcaaatgaagacgatgatgtacaccatgcctatcatgatgatcttcatgtccttctcactccctgctggtgttggtctttactggctagttggtggtttctttagtattattcaacagttaatcacaacctacctcttaaaacctcgattgcataagcaaattaaagaagaatacgctaaaaacccgcctaaagcataccaatcaacttcttctcgtaaggacgttacgccttcacaaaacatggaacaggctaacttgcctaaaaaaataaaatccaatcgtaatgctggaaaacagcgaaagcgttaa

SEQ ID NO: 616 - protein, 307 aa, Streptococcus pyogenes
MKLTLNRILFSGLALSILLTLTGCVGRDAHGNPKGMIWEFLGKPMSYFIDYFANNAGLGYGLAIIIVTIIVRTLILPLGLYQSWKASYQSEKMAFLKPVFEPINKRIKQANSQEEKMAAQTELMAAQRAHGINPLGGIGCLPLLIQMPFFSAMYFAAQYTKGVSTSTFMGIDLGSRSLVLTAIIAALYFFQSWLSMMAVSEEQREQMKTMMYTMPIMMIFMSFSLPAGVGLYWLVGGFFSIIQQLITTYLLKPRLHKQIKEEYAKNPPKAYQSTSSRKDVTPSQNMEQANLPKKIKSNRNAGKQRKR

SEQ ID NO: 617 - DNA, 1053 bp, Streptococcus pyogenes
ttgcaagagtattctattgacattaccttaacccatcctgatgatgttttagctctttttggtagcaacgagcgtcatttgaagctaatagaagctcatttaggagttattgttcacgcaagaaccgagcgagtccaagtgattggtgatgatgaagaagctgtggaattggctcgattgaccatcaaagccctactggttctagtgggtcgtggcatggtggtcaacacatcagatgtggtgacagctttatctatggcagaatctcatcagattgaccaatttatggcgctttatgaagaagaaatcattaaagataactatggtaaggcaatacgagtcaaaacattaggtcaaaaaacctatgttgatagtgtcaaacgtcatgatgtggtttttggtgtaggacctgcagggacaggtaaaaccttcttagctgttacgcttgcagtcactgctctgaaaagaggacaggtaaagcgtattattttgacgcgtcctgcggtagaagctggcgaaagcctaggttttttaccaggcgatttgaaagaaaaggtggatccttacctcagacctgtttacgatgccctttatcacattttaggcaaggaacaaaccacacgcctgatggaacgagatgtgattgagattgctccgttagcttatatgcgaggtcgtactctggatgacgcttttgttatcttagatgaggctcaaaacacgaccatcatgcaaatgaagatgtttttgacccgtcttggttttaattctaaaatgattgtcaatggagatacgagtcagattgacctccctcgaaatgtcaagtctggtttgattgatgctactcagaaattacaaggcattaaacagattgattttgtctatttctctgctaaggatgttgtccgacatcctgttgtggctgatattatcaaggcttatgaaacgtcctcagaggagatgaaggacttactaaaacctaaggctagtgacgttgaagctgattaccagccaggcttgacaaaataccctgtgatcggtcaagagcactaa

SEQ ID NO: 618 - protein, 350 aa, Streptococcus pyogenes
MQEYSIDITLTHPDDVLALFGSNERHLKLIEAHLGVIVHARTERVQVIGDDEEAVELARLTIKALLVLVGRGMVVNTSDVVTALSMAESHQIDQFMALYEEEIIKDNYGKAIRVKTLGQKTYVDSVKRHDVVFGVGPAGTGKTFLAVTLAVTALKRGQVKRIILTRPAVEAGESLGFLPGDLKEKVDPYLRPVYDALYHILGKEQTTRLMERDVIEIAPLAYMRGRTLDDAFVILDEAQNTTIMQMKMFLTRLGFNSKMIVNGDTSQIDLPRNVKSGLIDATQKLQGIKQIDFVYFSAKDVVRHPVVADIIKAYETSSEEMKDLLKPKASDVEADYQPGLTKYPVIGQEH

SEQ ID NO: 619 - DNA, 996 bp, Streptococcus pyogenes
ttgcggcagattcagtccattcgtctgatagacgttttggagttggcttttggagttggctataaggaagaaacaacctctcagttttcttcggatcagccctcccaagtggttttgtatcgaggtgaggctaacacggttaggtttgcctataccaatcagatgtctctgatgaaagatattcgcattgctttggatggttctgataagtctttgaccgctcagattgttcctggtatgggtcatgtttatgagggctttcaaacttctgctagagggatttttacgatgtcaggagttcctgaaagcactgttcccgttgctaaccctaatgtacaaaccaaatatataaggtatttcaaagtcattgatgatatgcataacacaatgtataaaggaactgtttttcttgttcaaccgcaagcttggaaatacaccatgaaatctgttgatcagttaccagtagatgacttgaaccatattggcgttgctggtattgaacgaatgacaactctcattaaaaatgcgggtgcccttttaaccacaggaggtagtggggctttcccagacaatattaaagtatctattaatccaaaggggaggcaggccacgattacttatggggacggctctacggatattattcctccagcagttttatggaaaaaaggctccgtaaaagagcctactgaagccgatcaatctgtcggaacaccgactcctggtattcctggtaaattcaaacgagaccagagccttaacgagcatgaagctatggtaaatgtcgaaccactgtctcatgtagtaaaagacaatataaaggtcatagatgaaaaatcaacagggcggtttgagccttttagacctaatgaagatgagaaggagaagcctgccagcgatgttaaggtaagaccagcagaagttggtagctggctagaaccagcgacagctcttcctagtgttgaaatgagcgctgaggacaggttaaaaagttag

SEQ ID NO: 620 - protein, 331 aa, Streptococcus pyogenes
MRQIQSIRLIDVLELAFGVGYKEETTSQFSSDQPSQVVLYRGEANTVRFAYTNQMSLMKDIRIALDGSDKSLTAQIVPGMGHVYEGFQTSARGIFTMSGVPESTVPVANPNVQTKYIRYFKVIDDMHNTMYKGTVFLVQPQAWKYTMKSVDQLPVDDLNHIGVAGIERMTTLIKNAGALLTTGGSGAFPDNIKVSINPKGRQATITYGDGSTDIIPPAVLWKKGSVKEPTEADQSVGTPTPGIPGKFKRDQSLNEHEAMVNVEPLSHVVKDNIKVIDEKSTGRFEPFRPNEDEKEKPASDVKVRPAEVGSWLEPATALPSVEMSAEDRLKS

SEQ ID NO: 621 - DNA, 1194 bp, Streptococcus pyogenes
gtgaactggcgacaaaatctaaaagtggcttggcttggtaacttctttactggggcaagcttttcacttgttatgccttttatggctctatatgtggaaaatttaggtactccgacagaattagtagaatactatgctggtctggcagttgctgtgacggcacttgcttcagctttatttgctcctgtttgggggaagttggctgatcgttatggccgaaaacctatgatgctgcgagccagttttgttatgacatttacaatgggtggtttagctattattcctaatgtgttttggttactcattttgagattattaacaggtgtctctgcgggctatgtgccaaatgccactgccttgattgccagccaagccccaaaagaggagtcaggttatgctttaggcacattagcaacaggagtgacagcaggcgctttaattggtcctttactagggggaattttggcagagctattaggaattcgacaagttttcttattagttggtgtgatattatttttatgttctttaatgacagctgtttatgttaaagaagagtttaagccggttaggcgctttgagatgatacctacaaaagtcattttaaaacaggtaaaaagtccccagattatgcttggtttatttgtgactagtatgattattcaaatttcagctcaatcagtggcccccattttatcattgtatattcgtcatcttggtcaaactcacaacttaatgtttacttcaggcctggtagtttcggccatggggttttctagcttatttagcagttcttacttaggaaaattaggagatcgatttggcaatcatcggttattgttagccgctttgtgttatagctttatcatgtattttagcagtgccttagcgcagaccagttttcaattaggagtactacgctttgcttatgggtttggtgtgggcgctttgatgccaagtattaactctttactaactaagttaacaccaaaagaaggtatttctagagtatttgcctataatcaaatgtttagtaaccttggtcaagtcattggcccttttattggatcaaatgtggctgtagtgttaggctaccgttctgttttttatgtgactagtttgattgtgtttgttaatttaatatggagtttgattatatttcgaaaatatattaaagttaaggatattgtgtga

SEQ ID NO: 622 - protein, 397 aa, Streptococcus pyogenes
MNWRQNLKVAWLGNFFTGASFSLVMPFMALYVENLGTPTELVEYYAGLAVAVTALASALFAPVWGKLADRYGRKPMMLRASFVMTFTMGGLAIIPNVFWLLILRLLTGVSAGYVPNATALIASQAPKEESGYALGTLATGVTAGALIGPLLGGILAELLGIRQVFLLVGVILFLCSLMTAVYVKEEFKPVRRFEMIPTKVILKQVKSPQIMLGLFVTSMIIQISAQSVAPILSLYIRHLGQTHNLMFTSGLVVSAMGFSSLFSSSYLGKLGDRFGNHRLLLAALCYSFIMYFSSALAQTSFQLGVLRFAYGFGVGALMPSINSLLTKLTPKEGISRVFAYNQMFSNLGQVIGPFIGSNVAVVLGYRSVFYVTSLIVFVNLIWSLIIFRKYIKVKDIV

SEQ ID NO: 623 - DNA, 1095 bp, Streptococcus pyogenes
ttgactcaactaaaaactcaatatccctcgctcatcatagacgctagcttcatcaccttggcggcaaatgcaacggtcaagccccaggataagacctacaataccgtcaatcttctcaacagatttttccttatctggcttgatgttgcctccaggggcttgtcgcatcaccacgttttgtcccatccatttaaggactggatgaccaacatgttagattttccctaccatcatgagtttatagagttccttggacggtggactcatatccttatagccctgcccaaaaggcaccatggtcaagtcgacaccgcaattccaaggtatcttctggtaaccatcagagagaagacagggattgtaaaattaaccactgtgcaaaatacagcgttcactacccagtcgaatcaactcaaaaaacaatacgggcagttcttgttaacagaatctaataactgttgtgcatgcccaggctgtgatagaccactcattctaaccagtggcaacttagcagcagaaaattacgaggtttcagccattgaaaaagataaggacgctgaagcactgaatctgatagccctctgcccagatggttttttaacctatcaagcagataggcgcaaaaaaattgtaacaactctaaaaaatgttaaaaagattctagtctctgcacataacagccaacaagcgatttctgatatgaagttagacagtggaattgtttcagttttgactagtctcaataaactaaaatgtgatgaatataatatctcctatgactcgaagcaattgactgataagatatcacctgagaacaatcgtacgctttatcaattggttaaaaaccaagttattgataactacttaaccattcaaaaaatcatcgtaaatttggacaaacaaggaaaaattgattacgagaaaatccaatatcaaacgcgatcgatgtataaaaagttaaaagcagccaagcataataatctggctattttcaatactatttcggaaaaactccatctggctacactacaggacatctacttctgtcagatgattgtctcttactttatccaaaaatgcgaggtacttgaataa

SEQ ID NO: 624 - protein, 364 aa, Streptococcus pyogenes
MTQLKTQYPSLIIDASFITLAANATVKPQDKTYNTVNLLNRFFLIWLDVASRGLSHHHVLSHPFKDWMTNMLDFPYHHEFIEFLGRWTHILIALPKRHHGQVDTAIPRYLLVTIREKTGIVKLTTVQNTAFTTQSNQLKKQYGQFLLTESNNCCACPGCDRPLILTSGNLAAENYEVSAIEKDKDAEALNLIALCPDGFLTYQADRRKKIVTTLKNVKKILVSAHNSQQAISDMKLDSGIVSVLTSLNKLKCDEYNISYDSKQLTDKISPENNRTLYQLVKNQVIDNYLTIQKIIVNLDKQGKIDYEKIQYQTRSMYKKLKAAKHNNLAIFNTISEKLHLATLQDIYFCQMIVSYFIQKCEVLE

SEQ ID NO: 625 - DNA, 1176 bp, Streptococcus pyogenes
ttgtccttctttttccttgaagtcttaacttattttgattatgatagtagtatgactattaaggcagaaattaaggcgctcgccaaagaaattggtatctctaaaattggttttacgacggcagataactttgattatttggaaaagtcattgcgtgcttctgtggaagaggggcgcaattcaggatttgaacataaagtcatagaggatcgtatctacactgaaaggcttttagaatcggctaaaacgattatttcaattggcgttgcttatcctcacaaacttcctcagcaacctcaaaaaacaccttataaacgtggaaaaattacacctagttcgtgggggcttgattatcattatgtggtcggcgaaaagttagacagactatcaaaaggcattgaagagctgtgtcgagattttcctttgcaacaaaaagcaatggtcgatactggagctttagttgatactgcagttgcccaaagagcgggtattggttttataggaaaaaatggtctagttatttctaaagaatatggctcttatatgtttttgggagaattaattaccaatttagagatcgagccagacaagcctgtcgattatgattgtggtgactgtcgtcgttgtctagatgcctgtccaacttcttgtttaattggtgatggctcaatgaatgccaagcgttgtctatcatttcaaacccaagataagggaatgatggacatagagtttcgaaaaaagattaaaacagttatctatggttgtgatatttgccaaatttgctgtccttataacaagggtataaacaattcaccagctacagagattgatcctgagttggctcaaccagaattaataccatttttgagtttatcaaatggaaaatttaaagaaaaatttggtatgattgctggaagttggcgaggtaaaaatattttacagcgtaatgccattattgcgctagcaaatgctcatgataaaactgcagtggtcaaattaatagagattattgataaaaataataaccctattcatactgcaacagctatatgggcattgggagaaattgtcaaaaaaccaaacgatgagatactggcgtttatgagtcatttaaccttaaaagatgaagatagccgaaaagagttggaattaatccgtcataaatggcaattttaa

SEQ ID NO: 626 - protein, 391 aa, Streptococcus pyogenes
MSFFFLEVLTYFDYDSSMTIKAEIKALAKEIGISKIGFTTADNFDYLEKSLRASVEEGRNSGFEHKVIEDRIYTERLLESAKTIISIGVAYPHKLPQQPQKTPYKRGKITPSSWGLDYHYVVGEKLDRLSKGIEELCRDFPLQQKAMVDTGALVDTAVAQRAGIGFIGKNGLVISKEYGSYMFLGELITNLEIEPDKPVDYDCGDCRRCLDACPTSCLIGDGSMNAKRCLSFQTQDKGMMDIEFRKKIKTVIYGCDICQICCPYNKGINNSPATEIDPELAQPELIPFLSLSNGKFKEKFGMIAGSWRGKNILQRNAIIALANAHDKTAVVKLIEIIDKNNNPIHTATAIWALGEIVKKPNDEILAFMSHLTLKDEDSRKELELIRHKWQF

SEQ ID NO: 627 - DNA, 1014 bp, Streptococcus pyogenes
ttggaagaggagattgctcttcttgaaaatcacatgactgagccagacttttggaatgacaatattgcagcgcaaaagacatctcaagaactaaatgagttaaaaggtaagtatgatactttccataatatgcaagaattatctgacgaaacagaactcttacttgagatgcttgacgaagatgattctttgaaagaagaattagaagaaaatctaatgcagctagataagataatgggtgcttatgaaatgacgcttctcttatctgaaccctatgaccacaataatgctatcttagaaatccatcctggttcaggaggaactgaagcgcaagattggggagatttactcttacgaatgtatacccgttttggcaatgctaatggtttcaaaatagaagtattggattatcaagcaggagatgaagctggtattaaatcggttaccctctcttttgaaggccccaatgcttatggtttgttgaaatcagaaatgggagttcatcgcctcgttcgtatatcaccttttgattcggctaaacgtcgtcatacctcatttgcttcagttgaagtgatgccagagttagatgatacgattgaagtagaagtacgtgatgatgacattaaaatggatactttccgttccggaggagctggtggtcagaatgtcaataaagtatcaacaggtgttcgtttgacgcatattccaactggaattgtggtatcgtctaccgttgaccgtactcaatatggaaaccgcgatcgcgctatgaagatgttgcaggctaagctatatcagttagaacaagaaaagaaagcacaagaagtagatgctctcaagggtgataaaaaagaaatcacttggggaagtcagattcgttcttatgttttcaccccttatacgatggtgaaggatcatcgtactaactttgagcttgctcaggtagataaggttatggatggagagatcaatggctttattgatgcctaccttaagtggcgcattgaagactaa

SEQ ID NO: 628 - protein, 337 aa, Streptococcus pyogenes
MEEEIALLENHMTEPDFWNDNIAAQKTSQELNELKGKYDTFHNMQELSDETELLLEMLDEDDSLKEELEENLMQLDKIMGAYEMTLLLSEPYDHNNAILEIHPGSGGTEAQDWGDLLLRMYTRFGNANGFKIEVLDYQAGDEAGIKSVTLSFEGPNAYGLLKSEMGVHRLVRISPFDSAKRRHTSFASVEVMPELDDTIEVEVRDDDIKMDTFRSGGAGGQNVNKVSTGVRLTHIPTGIVVSSTVDRTQYGNRDRAMKMLQAKLYQLEQEKKAQEVDALKGDKKEITWGSQIRSYVFTPYTMVKDHRTNFELAQVDKVMDGEINGFIDAYLKWRIED

SEQ ID NO: 629 - DNA, 1167 bp, Streptococcus pyogenes
ttgcgttatttaacagcaggagaatctcatgggccatccttaacagctattattgaaggtataccagcaggattaactcttcatccagcggatattgatcacgaattacagcgacgtcaaggaggttatggccgtggtgccagaatgtctattgagactgatcgggttcaaatatcctcaggagttcgtcatggtaaaacaacaggggcccccattaccttaacggtaattaataaggaccaccaaaaatggctagatgtcatggctgtaggagacattgaagagactctcaagttaaagcgtcgtgttaagcatcctagaccaggacatgcggatttggtaggaggtattaaatatcattttaacgatttaagagatgctttagagcgttcctcggctagagaaacaacgatgagagtggctgtaggcgctgttgctaaacgtatcttagctgaacttggaattgatatgttacatcatatcttaatatttggtggtataacgatcacaataccttctaagctctcttttagagagctgcaagaaagggctctccattcagaattatctattgttaatccaaagcaagaagaagaaattaaaacgtatattgataagataaaaaaagaaggggataccattggtggtattatcgaaacgatagttcaaggggtgccagcaggtcttggatcttatgtccaatgggataaaaaattagatgccaagctggctcaagcagttctttccattaatgcttttaaaggggtggaatttggagctgggtttgatatgggattccaaaagggctctcaggtaatggatgaaatcacctggacacctacccagggctatggtcgtcaaacaaaccacttaggtggctttgaaggtggcatgaccacaggacaacctcttgttgttaaaggggttatgaagcccattcctactttgtataaaccactcatgtcggtagatattgatagtcatgaaccttataaagcaacggtggaacgctctgatccgacggccttaccagctgcaggggttatcatggaaaatgtggtggcgacggtgcttgccaaagagattttagagactttttcttctactaccatgtctgaattgcaaaaagctttttcggactatcgtgcctacgtcaagcaattttag

SEQ ID NO: 630 - protein, 388 aa, Streptococcus pyogenes
MRYLTAGESHGPSLTAIIEGIPAGLTLHPADIDHELQRRQGGYGRGARMSIETDRVQISSGVRHGKTTGAPITLTVINKDHQKWLDVMAVGDIEETLKLKRRVKHPRPGHADLVGGIKYHFNDLRDALERSSARETTMRVAVGAVAKRILAELGIDMLHHILIFGGITITIPSKLSFRELQERALHSELSIVNPKQEEEIKTYIDKIKKEGDTIGGIIETIVQGVPAGLGSYVQWDKKLDAKLAQAVLSINAFKGVEFGAGFDMGFQKGSQVMDEITWTPTQGYGRQTNHLGGFEGGMTTGQPLVVKGVMKPIPTLYKPLMSVDIDSHEPYKATVERSDPTALPAAGVIMENVVATVLAKEILETFSSTTMSELQKAFSDYRAYVKQF

SEQ ID NO: 631 - DNA, 993 bp, Streptococcus pyogenes
gtgaaagataaagcatatgatattacgattattggtggtggtccaataggtttatttgcagccttttatgcaggtcttaggggcgtaacagtaaagattattgagagtttgtcagaacttggtggacagcctgccattctttatcctgagaaaatgatttatgatattccagcttatccatctttaacaggtgttgagttgacagaaaatttaataaaacaattgagccgttttgaagatcgtacaaccatttgtttaaaagaagaagtattaacctttgacaaggttaaaggtggtttttcgattaggactaataaggcagagcatttttcaaaagccattatcattgcttgtggaaatggcgcttttgcaccaagaactttagggttagaaagtgaggaaaactttgctgatcataaccttttttataatgttcaccagttggaccagtttgcgggacaaaaagttgtgatttgtggtggtggagattcagcagttgattgggctttggctttagaagatattgctgagagtgtgacggttgtgcaccgtcgtgatgctttcagagcacatgaacacagtgtggaattattgaaagcatcaacggtcaacctcttaacaccttatgtgccaaaagcattgaaaggaattggaaacctggctgaaaaattagttattcaaaaagtgaaagaagatgaagtgttagaacttgaattggacagtcttattgttagttttggtttttcaacttctaataagaatttgaaaaattggaatctcgactataagcgttcaagtattactgtttcaccactttttcaaacaagtcaagaaggtatttttgccattggtgatgcagccgcttataatgggaaagtggatttgattgctactggttttggcgaagcaccaacagcagttaatcaggccattaactatatttatccagatcgagataaccgtgtggtgcattcaacctctttaattgactaa

SEQ ID NO: 632 - protein, 330 aa, Streptococcus pyogenes
MKDKAYDITIIGGGPIGLFAAFYAGLRGVTVKIIESLSELGGQPAILYPEKMIYDIPAYPSLTGVELTENLIKQLSRFEDRTTICLKEEVLTFDKVKGGFSIRTNKAEHFSKAIIIACGNGAFAPRTLGLESEENFADHNLFYNVHQLDQFAGQKVVICGGGDSAVDWALALEDIAESVTVVHRRDAFRAHEHSVELLKASTVNLLTPYVPKALKGIGNLAEKLVIQKVKEDEVLELELDSLIVSFGFSTSNKNLKNWNLDYKRSSITVSPLFQTSQEGIFAIGDAAAYNGKVDLIATGFGEAPTAVNQAINYIYPDRDNRVVHSTSLID

SEQ ID NO: 633 - DNA, 945 bp, Streptococcus pyogenes
gtggatccaaatgttataaccgtaacatcctatgctaacattgctattatcaaatattggggaaaagagaatcaagctaagatgattccttcgacctctagcatttctttgactttggaaaacatgttcaccacaaccagcgtttccttcttaccagatactgcaaccagtgatcagttttacattaacggtatcttgcaaaatgacgaagaacataccaaaatttctgctatcattgaccaatttcgccaacctggtcaggcttttgtaaagatggaaactcaaaataatatgccaacagctgcaggtttatcatcaagttccagtggcttatcagccttggttaaagcctgtgaccaattatttgacacccagctagatcagaaagctttagctcaaaaggctaagttcgcctcaggatcatcttctcgttctttttttggcccagtcgctgcttgggacaaagatagtggtgctatttacaaggttgagactgacttgaaaatggccatgattatgctggtcttaaatgctgcgaaaaagccaatttctagccgagagggcatgaagttatgccgcgatacctcaactacatttgatcaatgggtagaacaatcggcaatcgattaccaacatatgcttacctatctcaaaactaataattttgagaaagttggtcagttaacagaagctaatgccttggccatgcatgccacgacaaagacagccaatcctcctttttcttacctaacaaaagagtcttaccaggctatggaggctgtgaaagaactgcgtcaagaaggttttgcttgttattttaccatggacgcaggtccaaatgtgaaggtcctatgtttagaaaaagacttggctcaactagcagaacgacttggcaagaactaccgtattatcgtttcaaaaacaaaggatttaccagatgtctaa

SEQ ID NO: 634 - protein, 314 aa, Streptococcus pyogenes
MDPNVITVTSYANIAIIKYWGKENQAKMIPSTSSISLTLENMFTTTSVSFLPDTATSDQFYINGILQNDEEHTKISAIIDQFRQPGQAFVKMETQNNMPTAAGLSSSSSGLSALVKACDQLFDTQLDQKALAQKAKFASGSSSRSFFGPVAAWDKDSGAIYKVETDLKMAMIMLVLNAAKKPISSREGMKLCRDTSTTFDQWVEQSAIDYQHMLTYLKTNNFEKVGQLTEANALAMHATTKTANPPFSYLTKESYQAMEAVKELRQEGFACYFTMDAGPNVKVLCLEKDLAQLAERLGKNYRIIVSKTKDLPDV

SEQ ID NO: 635 - DNA, 882 bp, Streptococcus pyogenes
ttgctgacctttggaggtgcaagtgcggttaaggcggaagaaaatgaaaaagtaagagagcaagaaaagctcatacagcaactttctgaaaagctagtggaaattaatgacttacaaactttaaatggtgataaagagagtatacagtctctcgtagattatctgactcgaagaggaaaacttgaagaagaatggatggaatatttgaattctggtattcaacgcaaactttttgttggtccaaaaggacctgcaggtgaaaaaggagaacaaggtcctactggaaaacaaggcgagcgtggtgagaccggccctgcaggtccacgtggtgacaagggcgaaactggtgacaaaggagcccagggtccagtaggtcccgctggcaaggacggccaaaacggtaaagatggtcttccaggtaaagacggcaaggacggccaaaacggtaaagatggtcttccaggtaaagacggcaaggacggccaagacggtaaagatggcctcccaggtaaagacggtaaggatggccaaaatggcaaagatggtcttccaggtaaagacggtcaaccaggtaaaccagctcctaaaacaccagaggtccctcaaaacccagatactgcaccacatactccaaaaacccctcggatccctggtcaatcaaaagacgtgacacctgctcctcaaaacccttctaatagaggtctaaacaaaccacaaacacaaggtggtaatcagctcgcaaaaacaccggcagctcacgacacacacagacaattgccagcaacaggcgaaacaaccaatccattctttacagcagctgctgtagctatcatgacgacagctggagttgtagctgttgcaaaacgtcaagaaaacaactaa

SEQ ID NO: 636 - protein, 293 aa, Streptococcus pyogenes
MLTFGGASAVKAEENEKVREQEKLIQQLSEKLVEINDLQTLNGDKESIQSLVDYLTRRGKLEEEWMEYLNSGIQRKLFVGPKGPAGEKGEQGPTGKQGERGETGPAGPRGDKGETGDKGAQGPVGPAGKDGQNGKDGLPGKDGKDGQNGKDGLPGKDGKDGQDGKDGLPGKDGKDGQNGKDGLPGKDGQPGKPAPKTPEVPQNPDTAPHTPKTPRIPGQSKDVTPAPQNPSNRGLNKPQTQGGNQLAKTPAAHDTHRQLPATGETTNPFFTAAAVAIMTTAGVVAVAKRQENN

SEQ ID NO: 637 - DNA, 1155 bp, Streptococcus pyogenes
ttgactaagccaattatcacatttaacaatgtttcaaaaacatttgaggacagtggaacacaggttctaaagaacattaactttgaccttgaagaaggaaaattttacaccctgcttggagcttctggctctggaaaatcaactattttaaatattatggcgggcctactagatgccagcagcggagacatttatttagatggggaacgtattaatgatttgccgattaataaacgtgacattcataccgttttccaaaattatgccctcttccctcatatgactgtttttgagaatgttgcctttgctttgaagctgaagaaagtggacaagaaagagattgctaagcgcgtgaaagaaaccttgaaaatggttcaattagaagggtttgaaaatcgttctatccagaagttgtctggtggtcaacgtcaacgtgttgccattgcgcgtgcgattatcaatcaaccgcgtgtggtcttacttgacgaaccactctcagcccttgatttgaaattaagaacagagatgcaatatgaattacgtgaattgcaacaacgtctaggcattacctttgtttttgttactcacgatcaagaagaagccttggccatgagtgattggatttttgtcatgaatgaaggtgaaattgttcagtcgggaacaccagtggatatttacgatgagccaattaatcattttgttgctaattttattggagaatctaatattattaacggtaccatgattgaagactatcttgtctcctttaacgggaaagaatttgaatctgtggacggtggaatgcgccctaatgagcctgttgaagtggttattcgtcctgaagatcttcaaattactttgccagaagaagggaaattacaagttaaggttgatacccaattattccgcggggttcactacgaaattattgcctatgatgaattgggtaatgaatggatgattcattctacccgcaaagctatcgaaggagaagttatcggattagattttacccctgaagatcttcatatcatgcgtcttaatgagactgaagaggaatttgatgcccgtattgaagaatatgtggaaatggatgagcctgaagatggattgattaatgccattgaggaggagcgtaatgaagaaaacctctag

SEQ ID NO: 638 - protein, 384 aa, Streptococcus pyogenes
MTKPIITFNNVSKTFEDSGTQVLKNINFDLEEGKFYTLLGASGSGKSTILNIMAGLLDASSGDIYLDGERINDLPINKRDIHTVFQNYALFPHMTVFENVAFALKLKKVDKKEIAKRVKETLKMVQLEGFENRSIQKLSGGQRQRVAIARAIINQPRVVLLDEPLSALDLKLRTEMQYELRELQQRLGITFVFVTHDQEEALAMSDWIFVMNEGEIVQSGTPVDIYDEPINHFVANFIGESNIINGTMIEDYLVSFNGKEFESVDGGMRPNEPVEVVIRPEDLQITLPEEGKLQVKVDTQLFRGVHYEIIAYDELGNEWMIHSTRKAIEGEVIGLDFTPEDLHIMRLNETEEEFDARIEEYVEMDEPEDGLINAIEEERNEENL

SEQ ID NO: 639 - DNA, 1122 bp, Streptococcus pyogenes
gtggacactttaatcgcaggaataacctccatcaccattcctcaaattgttatgatggtcattggtgccctcttaatgtatctaggaattaaaaaagaatacgaaccaaccttacttgtccccatgggacttggaaccattctcgttaacttccctggttcaggagttttaacacaagtggttaacggagtcgagcaagaaggggtttttgaggctctcttcaattttgggattggaacagaacttttcccactgttgattttcattggtataggagccatgattgactttggccccttgcttcaaaacccattcatgctcttgtttggtgatgcagctcaattcggaattttctttgttgtggttgttgccgtactggctggctttgacattaaagaagcagcttcaatcggcattatcggagcagcagacggaccgacttctatctttgttgccaaccaactggccaaggatttactgggtccaattacggttgcagcctattcttacatggctctggttcctattatccaaccatttgccattaaattagtgacaacgaaaaaagagcgccgtatccgtatgacttacaaagctgagaatgtatctcaaatgactaaaatcttattcccaatcatcattaccttagtagcagggttcatcgccccaatttctctacctttagttggctttttgatgttcggtaacttattacgggagtgtggtgtgctcgatcgcctgtcacaaactgctcaaaatgaattggtaaacattattagtatcttgcttggattgaccatctctattaaaatgcaggcagacctgttcttaaatgtacagacactcttaatcatcgtctttggtttacttgcttttatcatggattctatcggtggggtcatgtttgccaaatttctcaatctcttccgaaaagagaagattaatccaatgattggcgctgcgggtatttcagcttttccaatgtcaagtcgtgtcattcaaaaaatggcaacagatgaagacccgcaaaactttatcctcatgtatgctgtaggtgccaatgtctctggccaaatcgcctctgttatcgcaggtggtttgttgctagcttactttagctaa

SEQ ID NO: 640 - protein, 373 aa, Streptococcus pyogenes
MDTLIAGITSITIPQIVMMVIGALLMYLGIKKEYEPTLLVPMGLGTILVNFPGSGVLTQVVNGVEQEGVFEALFNFGIGTELFPLLIFIGIGAMIDFGPLLQNPFMLLFGDAAQFGIFFVVVVAVLAGFDIKEAASIGIIGAADGPTSIFVANQLAKDLLGPITVAAYSYMALVPIIQPFAIKLVTTKKERRIRMTYKAENVSQMTKILFPIIITLVAGFIAPISLPLVGFLMFGNLLRECGVLDRLSQTAQNELVNIISILLGLTISIKMQADLFLNVQTLLIIVFGLLAFIMDSIGGVMFAKFLNLFRKEKINPMIGAAGISAFPMSSRVIQKMATDEDPQNFILMYAVGANVSGQIASVIAGGLLLAYFS

SEQ ID NO: 641 - DNA, 882 bp, Streptococcus pyogenes
gtgagtaattggacaacctatcctcagaaaaacctcacccaggcagaacaactggcccaattaatcaaagaagcagatgcacttgtagttggtattggagctggcatgtctgcagctgatggttttacttatatcgggtcgcgttttgagacggcattcccagattttattgctaagtatcagtttttggatatgctgcaagctagcctttttgattttgaagattggcaagaatattgggcttttcaaagtcgctttgtcgctttgaattatcttgatcagcccgtaggccagtcttatcttgatttaaaagagattttgggaaccaaagactatcatattattactactaatgctgataatgctttttgggtggctggttatgatcctcataacatttttcacattcaaggagaatatggtttgtggcaatgtagccagcactgccatcagcaaacttataaggacgatacggtcatccgtcaaatgatcgcagagcaaaaaaacatgaaagtcccaggtcaactgattcctcattgccctgaatgtgaggcgccttttgaaatcaataagcgtaatgaagaaaaaggaatggttgaagatgctgactttcatgcccaaaaagcacgttatgaggcttttttatcagaacataaagagggtaaagtgctttatctagaaattggtgtgggacatacgacgcctcagtttatcaaacaccccttttggaaacgtgtctcagaaaatcctaatgccttattcgttaccttgaatcacaaacattaccgcatccctctgtcaataaggcgacaaagcctagaactgacagaacacattgcacaattgattagcgccacaaaaaccatttaccaaaaatcgtaa

SEQ ID NO: 642 - protein, 293 aa, Streptococcus pyogenes
MSNWTTYPQKNLTQAEQLAQLIKEADALVVGIGAGMSAADGFTYIGSRFETAFPDFIAKYQFLDMLQASLFDFEDWQEYWAFQSRFVALNYLDQPVGQSYLDLKEILGTKDYHIITTNADNAFWVAGYDPHNIFHIQGEYGLWQCSQHCHQQTYKDDTVIRQMIAEQKNMKVPGQLIPHCPECEAPFEINKRNEEKGMVEDADFHAQKARYEAFLSEHKEGKVLYLEIGVGHTTPQFIKHPFWKRVSENPNALFVTLNHKHYRIPLSIRRQSLELTEHIAQLISATKTIYQKS

SEQ ID NO: 643 - DNA, 963 bp, Streptococcus pyogenes
gtgacaaaaatattaaccgctttagatgataagaatcagctcatttcgctagtaactcagcctatttcaacgaaaccgccttttcgttgcccagcttgcaaatctcctgttcgcttgcgtcaggggacaattagacgacctcattttgcccatgtacaactagctcattgtcaattccaagcagaaaatgaatctgaggaacatttgacgttgaaggcaaaactttacaccagtttagtccgaacagaagctgtctgtattgaaaaatatcttcctgagctgcaacagatagcagacctttgggtgaatgataagttagccttagaaattcagtgcagtcccttgccagttgagcgtctaaagaaacgcaccaaagcctatcaagaaaaggggtatccggtacgatggttactgggaagaaaattgtggcttaacactcacttaactgctttgcaaaaacagtttctttacttttcatctagtttgggctttcatttgtgggagctggatgcagctgcaaatctgctacgtctcaaatatttaatccatgaagacttatttggtaaggtaagttacctaaccaaaaccatttctttagaccacaatattatggaaatgtttcggttaccctatcagcaagaaatcctttattcttatcagaaaaaaatgactgtgaacctatctaaaagaatacaaagagctcttttagctagacacccgaaatggctacgacgacaagaaaaggcttacttatcaggctataatttacttatgttaacaactgatgctttttatcctcaatggagaccagttcaatcttccagcggtttttgtcaaattaaaggaaatcttcgcccttattatgaaagttttaaagtctattataaaaaagaaaaggataagaaggtgcaaacgcttttttcaccaaaatattatgttaaaatggatagtaatagaaaatga

SEQ ID NO: 644 - protein, 320 aa, Streptococcus pyogenes
MTKILTALDDKNQLISLVTQPISTKPPFRCPACKSPVRLRQGTIRRPHFAHVQLAHCQFQAENESEEHLTLKAKLYTSLVRTEAVCIEKYLPELQQIADLWVNDKLALEIQCSPLPVERLKKRTKAYQEKGYPVRWLLGRKLWLNTHLTALQKQFLYFSSSLGFHLWELDAAANLLRLKYLIHEDLFGKVSYLTKTISLDHNIMEMFRLPYQQEILYSYQKKMTVNLSKRIQRALLARHPKWLRRQEKAYLSGYNLLMLTTDAFYPQWRPVQSSSGFCQIKGNLRPYYESFKVYYKKEKDKKVQTLFSPKYYVKMDSNRK

SEQ ID NO: 645 - DNA, 861 bp, Streptococcus pyogenes
ttgcggttatggttcgttatgaataatcgtcatttatttagtgggatatttttctttgttattagtttatgtctggcctttttattgctaaatattattatccctaagtcaaattcacgtttgaaaaagagtgattttctgaaaaaagaacaagtagctatccaatatgttgctataggagattcattgacagaaggagtaggtgatctaactcatcaaggtggttttgttcctttgttaacgaatgatctcagtgaatattttaaggctaatgttaatcatcaaaattacggcgtatctggtgataccagtcaacaaattcttgataggatgataaaacaaaagcagatacagttatctttaaaaaaagcagatataatgacgttaaccgttggtggtaatgatgttatggcagttattcggaagaatttagcggatttgcaagtttctagttttagaaagccagctcgtcagtatcaaaaacgattaagacagattatcgagttagccagaaaagataataaagatcttcctatttttattttaggcatctataatccgttttatttgaattttccagaactaactgatatgcaaaaagtgattgatgactggaataccaaaactaaggaggttgttggagaatacgatcgtgtgtactttgtgccaataaatgacctcttgtataaagggataaatggacaagaaggaattgttcattcttcaggagatcaaactacaattgtcaatgatgccttgtttactggggaccattttcacccaaataatactggctatcaaatcatgtcaaatgcagtaatggagaaaattaaaaagcatgaaaaaaaaatcaaaccttaa

SEQ ID NO: 646 - protein, 286 aa, Streptococcus pyogenes
MRLWFVMNNRHLFSGIFFFVISLCLAFLLLNIIIPKSNSRLKKSDFLKKEQVAIQYVAIGDSLTEGVGDLTHQGGFVPLLTNDLSEYFKANVNHQNYGVSGDTSQQILDRMIKQKQIQLSLKKADIMTLTVGGNDVMAVIRKNLADLQVSSFRKPARQYQKRLRQIIELARKDNKDLPIFILGIYNPFYLNFPELTDMQKVIDDWNTKTKEVVGEYDRVYFVPINDLLYKGINGQEGIVHSSGDQTTIVNDALFTGDHFHPNNTGYQIMSNAVMEKIKKHEKKIKP

SEQ ID NO: 647 - DNA, 987 bp, Streptococcus pyogenes
ttgaaacatcctattcgaaaaacacttgtcaccttaggtctattactgaccttatgcctgccgactccagttgcagctagttctcgttcttggaagagctggtttatcgagcaatatttctggttaaaacgtgacaagagttactattctaaacaagatgacccaagcttccaaagataccttgatgcctgtcgtgaacaatctgataaaccttatcaactagatactaatttagtcaatggtccccttgttcaagaaaatctttatggcatgcaggtttactcttggaatgataatggaaaacctgatcaaaaaacaattatttatcttgccggtggttcttatcttaacaatccaacgacataccatattaatatgttaaagacattatccacaagtcttgacgctaaaattgttttacccatttatcctaaagccccacgttatacctataactatactatgccaaaattggtcaatctttaccaacactattaccataaaaatcagaatgttttccttatgggagattcagcaggtggaggtttagccttaggtctagctcatgccctacacaatgaatcagtccctcaaccaaagcagctcgttcttttatcaccttggttagatgttactatgtcacacccagagattccagaatacgaagatgctgatcctattctatcttcttggggattaaaacgagtgggagaattgtgggcctactctgctgataataccaaccatatttatgtcagtcctaaaaatggtccgatcacttatctaccaccaattactttatttactgggacacgagagatcttttatcctgatattcgcgattatgccgcaaaactgaaagccgctaaccacaatattacctttattacccaagaaggcatgaaccacgtttacccaatttatcctatcgaagaggcaaaaacagctcaataccaaatcattgatgccatcaacaaaactccttaa

SEQ ID NO: 648 - protein, 328 aa, Streptococcus pyogenes
MKHPIRKTLVTLGLLLTLCLPTPVAASSRSWKSWFIEQYFWLKRDKSYYSKQDDPSFQRYLDACREQSDKPYQLDTNLVNGPLVQENLYGMQVYSWNDNGKPDQKTIIYLAGGSYLNNPTTYHINMLKTLSTSLDAKIVLPIYPKAPRYTYNYTMPKLVNLYQHYYHKNQNVFLMGDSAGGGLALGLAHALHNESVPQPKQLVLLSPWLDVTMSHPEIPEYEDADPILSSWGLKRVGELWAYSADNTNHIYVSPKNGPITYLPPITLFTGTREIFYPDIRDYAAKLKAANHNITFITQEGMNHVYPIYPIEEAKTAQYQIIDAINKTP

SEQ ID NO: 649 - DNA, 1035 bp, Streptococcus pyogenes
gtgattacacaacgtcaaaatgatattttgaatttaatcgttgagctatttacacaaactcatgaaccagtagggtctaaagctttacagagaacgattgattctagtagcgccactattcgtaatgatatggcaaaactagagaagttgggattgttggaaaaagcgcacacttctagtggacggatgccaagtccagctggttttaagtattttgtagagcactccctcaggctagatagtattgatgagcaagatatttatcatgtcataaaagcttttgattttgaagcattcaaattagaagacatgcttcaaaaagctagtcacattttagcggagatgacgggctatacatccgttattttagatgtggagccagctcgtcaacgtttaacagggtttgatgttgttcagcttagcaaccatgatgctctagcagtcatgactttagatgaatctaagccagtgacagtgcagtttgctattccaagaaactttttgacacgtgacttgatagcatttaaagctatcgtagaggagcgcttgctggataatagtgtcatagatattcattataagttgaggacagaaattcctcagatcgttcaaaagtattttgtgactacggataatgttttacaactatttgattatgttttttcagagctgtttttggaaacggtatttgttgctggcaaggtaaattctttaacgtattcagatctatcaacgtatcagtttttggataatgaacagcaagtagcaatttctttgaggcaaagtctgaaagaaggtgagatggcttctgtccaagtggcagatagtcaagaagccgcacttgcagatgtgtcagttttaactcacaaatttttgattccttaccgtgggtttggactcctgagtttgattggtcctattgatatggattatcgtaggtctgttagtttggtaaacattattggaaaggtattggctgctaaattaggtgattattatcgatacctaaattctaaccattatgaagttcactga

SEQ ID NO: 650 - protein, 344 aa, Streptococcus pyogenes
MITQRQNDILNLIVELFTQTHEPVGSKALQRTIDSSSATIRNDMAKLEKLGLLEKAHTSSGRMPSPAGFKYFVEHSLRLDSIDEQDIYHVIKAFDFEAFKLEDMLQKASHILAEMTGYTSVILDVEPARQRLTGFDVVQLSNHDALAVMTLDESKPVTVQFAIPRNFLTRDLIAFKAIVEERLLDNSVIDIHYKLRTEIPQIVQKYFVTTDNVLQLFDYVFSELFLETVFVAGKVNSLTYSDLSTYQFLDNEQQVAISLRQSLKEGEMASVQVADSQEAALADVSVLTHKFLIPYRGFGLLSLIGPIDMDYRRSVSLVNIIGKVLAAKLGDYYRYLNSNHYEVH

SEQ ID NO: 651 - DNA, 966 bp, Streptococcus pyogenes
gtggtcgcaaaattaacagacgtggcagccttggcgggtgtcagtccaacaactgtttcgcgagtaatcaacaaaaaaggctacctttcccaaaaaacagtgaataaggtgaataaggccatgcgtgaattgggctacaagcctaacaatctcgctagaagtttgcaaggtaaatcaacccaactcattgggcttatcttccccaacattagcaatatcttttacgctgaattaattgaacatttggaaattgaattgtttaaacagggctacaaaactattatttgcaatagtgaacataatcccgtcaaagaacgcgaatatttagaaatgcttgcggccaatcaagtggacggcattatttcttccagtcataatttgggaattgaggattatgagcgtgtcgaagctcctattgtagcttttgaccgtaatctagcgccaaatatcccggttatttcttcagataattttgaaggtggtaaattagccgcacaaactttgcaaaaacacggttgtcaaaacattgtcatgattacaggtaatgacaattctgattcgcccacagggttgcgccagctagggtttaactaccagctcaaacgaagtgcagaaatcatcaaattaccaaataacctatctcctgttagacgcgaaatggaaattaaatccattttggcaacccgaaaacctgatggccttttcgtttctgatgatttaactgctatcctcattatgaaagtagccaaacaacttcacattactattccagaggatatgaaagtcataggttatgatggaacgacatttatccagcaatatgttcctcaattagcgaccattcgtcaacctattgatgagattgctaaattgagtgtcgaaatactcatcaaaaaaattaaaaaagaaaaaaccagtaaagactatattttaccgattacgctacttccaggagcaagtatttaa

SEQ ID NO: 652 - protein, 321 aa, Streptococcus pyogenes
MVAKLTDVAALAGVSPTTVSRVINKKGYLSQKTVNKVNKAMRELGYKPNNLARSLQGKSTQLIGLIFPNISNIFYAELIEHLEIELFKQGYKTIICNSEHNPVKEREYLEMLAANQVDGIISSSHNLGIEDYERVEAPIVAFDRNLAPNIPVISSDNFEGGKLAAQTLQKHGCQNIVMITGNDNSDSPTGLRQLGFNYQLKRSAEIIKLPNNLSPVRREMEIKSILATRKPDGLFVSDDLTAILIMKVAKQLHITIPEDMKVIGYDGTTFIQQYVPQLATIRQPIDEIAKLSVEILIKKIKKEKTSKDYILPITLLPGASI

SEQ ID NO: 653 - DNA, 930 bp, Streptococcus pyogenes
gtgattttaacagttactttaaatccagctattgatgtctcctaccctttggatgagctaaaatgcgatactgtcaatcgagttgtagacgttacaaagacacccggtggtaaaggcttgaatgtttcccgagttcttaatgaattcggtgagacagtcaaagctacaggttgtgtaggtggagaaagcggtgattttatcattaatcatcttcctgattcgattttaagtcgcttctataaaatttcaggtgatactagaacttgtatagccattttacacgaaggtaatcaaacggagattttagaaaaaggaccgatgttaagtgtagatgaaattgatggatttactcatcattttaagtatttactgaatgatgttgacgtagtgacgctctcaggcagtttgcctgctggtatgccagatgattactatcagaagttaatcaagattgccaatcttaatggtaagaaaacggttctggattgttctggaaatgctctagaagcagtactaaaaggtgatagtaaaccaacagttatcaaacctaatcttgaagaactttctcaacttctaggtaaagaaatgacaaaagattttgatgccttaaaagaagtcttacaagatgaactatttgatggaattgaatggataatcgtttctcttggtgctgatggtgtatttgcaaagcacaaggatacgttttataacgttgacattcctaaaatcaaaattgtaagcgctgtaggttcaggggattctacagtggcaggtattgcttcaggtttagcgaatgatgaagatgatcgagctttattaacaaaagcaaatgtcttagggatgttaaatgcgcaagaaaaaacaactgggcatgttaacatggcaaattacgataagttatatcaatctattaaagtcaaagaggtataa

SEQ ID NO: 654 - protein, 309 aa, Streptococcus pyogenes
MILTVTLNPAIDVSYPLDELKCDTVNRVVDVTKTPGGKGLNVSRVLNEFGETVKATGCVGGESGDFIINHLPDSILSRFYKISGDTRTCIAILHEGNQTEILEKGPMLSVDEIDGFTHHFKYLLNDVDVVTLSGSLPAGMPDDYYQKLIKIANLNGKKTVLDCSGNALEAVLKGDSKPTVIKPNLEELSQLLGKEMTKDFDALKEVLQDELFDGIEWIIVSLGADGVFAKHKDTFYNVDIPKIKIVSAVGSGDSTVAGIASGLANDEDDRALLTKANVLGMLNAQEKTTGHVNMANYDKLYQSIKVKEV

SEQ ID NO: 655 - DNA, 978 bp, Streptococcus pyogenes
gtgaaacgtactaccattattatcatctggaaaatcatcagatgtgtcacgcttatttttggggtatctgttttgaccttcgttttgttaaaacaatctccagtagatccagtcatggcaagtgtcaattatgacacatcactaacccctgctcagtacaaagcgattgctcaccactatggcttggataagccagctctagtccaatattttatttggttgaaaaatgtgatacagggagatttagggacctcgctcgtttatcggcaacctgttagtgatattattagatcacgggcaggtgcttctttcatacttatgggactctcttggatcttatcgggtcttattggatttatcttaggaacgttatccgctttccatcaagggaaattacttgaccgagttgtcaggtggttttcataccttcagatatcagtaccaacgttttggattggactcatttttttattaatcttttctgtccagctggggtggttcccgattggtatttcttccccgataggcactttgagtcaagatattacgttagctgatcgagttaagcaccttatgttacctgttttcacgctaagtattctaggcattgccaatgtcacccttcatacgagaactaaaatgatgtcggtgctttctagtgaatatgtcttatttgccagagcgcgtggggaaacacagtggcaaatttttaaacatcattgccttagaaatgctatcgtaccagctattacactgcatttttcctattttggagaattgtttggaggatctgttcttgctgagcaagttttctcatatcctggcttagggtctaccctcactgaagcaggacttaaaagtgatacaccgctccttctagctattgtgatgatagggacattatttgtttttgcgggcaatcttattgcggatattttaaatagcatcatcaatccacagttaaggagaaaagtatga

SEQ ID NO: 656 - protein, 325 aa, Streptococcus pyogenes
MKRTTIIIIWKIIRCVTLIFGVSVLTFVLLKQSPVDPVMASVNYDTSLTPAQYKAIAHHYGLDKPALVQYFIWLKNVIQGDLGTSLVYRQPVSDIIRSRAGASFILMGLSWILSGLIGFILGTLSAFHQGKLLDRVVRWFSYLQISVPTFWIGLIFLLIFSVQLGWFPIGISSPIGTLSQDITLADRVKHLMLPVFTLSILGIANVTLHTRTKMMSVLSSEYVLFARARGETQWQIFKHHCLRNAIVPAITLHFSYFGELFGGSVLAEQVFSYPGLGSTLTEAGLKSDTPLLLAIVMIGTLFVFAGNLIADILNSIINPQLRRKV

SEQ ID NO: 657 - DNA, 1137 bp, Streptococcus pyogenes
ttggcaaaaaaattaaaaaagaatgaagaaatcactaagaagtttggtgacgaacgtcgcaaagcccttgatgatgctttgaaaaatattgaaaaagattttggtaagggtgcagtgatgcgattaggagaacgtgcagagcaaaaagttcaggttatgagttcaggaagtctagctcttgatattgcgcttggagctggtggttatcctaaaggacgtatcatcgaaatctatggtccagagtcttccggtaaaacgactgtggctttacatgctgtagcacaagctcaaaaagaaggtggaatcgcagcctttatcgatgccgagcatgcgcttgatccagcttatgctgctgcgcttggggttaatattgatgaactcctcttgtctcaaccagattctggagaacaaggacttgaaattgcaggtaaattgattgattctggtgcggttgatctggttgttgtcgattcagtagcagctttagtgccacgtgctgaaattgatggtgatattggcgatagccatgtcggattgcaagcacgtatgatgagtcaggccatgcgtaaattatcagcttctattaataaaacaaaaactatcgctatctttattaaccaattgcgtgaaaaagttggtgtgatgtttggaaatcctgaaacaacaccaggtggtcgagctttgaaattctatgcttctgttcggctggatgtgcgtggaacaactcaaattaaaggaactggtgaccaaaaagatagcagtattggtaaggagaccaaaatcaaggttgttaaaaacaaggtcgctccgccatttaaggtagcagaagttgaaatcatgtatggggaaggtatttctcgtacaggggagcttgtgaaaattgcttctgatttggacattatccaaaaagcaggtgcttggttctcttataatggtgagaagattggccaaggttctgaaaatgctaagcgttatttggccgatcacccagaattgtttgatgaaatcgaccttaaagtacgtgttaaatttggtttgcttgaagaaagcgaagaagaatctgctatggcagtagcatcagaagaaaccgatgatcttgctttagatttagataatggtattgaaattgaagattaa

SEQ ID NO: 658 - protein, 378 aa, Streptococcus pyogenes
MAKKLKKNEEITKKFGDERRKALDDALKNIEKDFGKGAVMRLGERAEQKVQVMSSGSLALDIALGAGGYPKGRIIEIYGPESSGKTTVALHAVAQAQKEGGIAAFIDAEHALDPAYAAALGVNIDELLLSQPDSGEQGLEIAGKLIDSGAVDLVVVDSVAALVPRAEIDGDIGDSHVGLQARMMSQAMRKLSASINKTKTIAIFINQLREKVGVMFGNPETTPGGRALKFYASVRLDVRGTTQIKGTGDQKDSSIGKETKIKVVKNKVAPPFKVAEVEIMYGEGISRTGELVKIASDLDIIQKAGAWFSYNGEKIGQGSENAKRYLADHPELFDEIDLKVRVKFGLLEESEEESAMAVASEETDDLALDLDNGIEIED

SEQ ID NO: 659 - DNA, 1266 bp, Streptococcus pyogenes
ttgaaattacttgttgttggttcaggtggtcgtgaacatgcgattgctaagaagttgttagcgtctaagggtgtggatcaggtttttgtggcacctggtaatgatggtatgaccttggatggtctggacttggtgaatatagtagtttccgaacattccaggttgattgcctttgctaaggagaatgagatttcttgggcctttattggtcctgatgatgcgctagcagctggtatcgttgatgatttcaacagtgctggactcagagcttttggtccaacaaaggcagcagcggagctagagtggtcaaaagactttgccaaggaaatcatggtcaaatacaatgtcccaacagcagcctatggcacattttcagactttgaaaaagccaaagcctacatcgaagagcagggcgcacctatcgtggtcaaggctgatggcttggcgctaggtaagggtgtggtcgtggctgaaaccgttgagcaggcggtagaggcggcgcaagagatgcttctggacaataagtttggcgattcaggagcgcgtgtggttatcgaggaattcttggatggcgaggagttttccctctttgcctttgctaatggcgataagttctacatcatgccgacagctcaggatcacaagcgtgcctttgacggagacaaggggccaaacactggtggtatgggtgcctatgcgccagttcctcatctacctcagagcgtggtagacacagcggttgagatgatcgttaggcctgtccttgagggcatggttgccgaagggcgtccttatctaggtgtcctctatgtggggcttatcctgacagctgatggacctaaggttatcgagttcaactcacgtttcggtgaccctgaaactcagattatcctccctcgcctgacttctgatttcgctcagaatattgacgatatcatgatgggcattgagccttacatcacttggcagaaggacggtgtgactttgggtgttgtcgttgcctcagaaggctatccattcgattatgagaaaggtgtgccactgcctgaaaagaccgacggcgatatcatcacctactacgcaggagttaagttttcggaaaatagcgagctacttctctcaaacggaggacgtgtctatatgctcgtcaccacagaagacagcgtcaaagcagggcaggacaaaatctatacccaactggcccaacaagacacaacaggtctcttctaccgaaatgatatcggaagcaaagctataagagaataa

SEQ ID NO: 660 - protein, 421 aa, Streptococcus pyogenes
MKLLVVGSGGREHAIAKKLLASKGVDQVFVAPGNDGMTLDGLDLVNIVVSEHSRLIAFAKENEISWAFIGPDDALAAGIVDDFNSAGLRAFGPTKAAAELEWSKDFAKEIMVKYNVPTAAYGTFSDFEKAKAYIEEQGAPIVVKADGLALGKGVVVAETVEQAVEAAQEMLLDNKFGDSGARVVIEEFLDGEEFSLFAFANGDKFYIMPTAQDHKRAFDGDKGPNTGGMGAYAPVPHLPQSVVDTAVEMIVRPVLEGMVAEGRPYLGVLYVGLILTADGPKVIEFNSRFGDPETQIILPRLTSDFAQNIDDIMMGIEPYITWQKDGVTLGVVVASEGYPFDYEKGVPLPEKTDGDIITYYAGVKFSENSELLLSNGGRVYMLVTTEDSVKAGQDKIYTQLAQQDTTGLFYRNDIGSKAIRE

SEQ ID NO: 661 - DNA, 1347 bp, Streptococcus pyogenes
ttgtctcaatcaactgcaacttatattaatgttattggagctgggctagctggttctgaagctgcctatcagattgctaagcgcggtatccccgttaaattgtatgaaatgcgtggtgtcaaagcaacaccgcaacataaaaccactaattttgccgaattggtctgttccaactcatttcgtggtgatagcttaaccaatgcagtcggtcttctcaaagaagaaatgcggcgattagactccattattatgcgtaatggtgaagctaaccgcgtacctgctgggggagcaatggctgttgaccgtgaggggtatgcagagagtgtcactgcagagttggaaaatcatcctctcattgaggtcattcgtggtgaaattacagaaatccctgacgatgctatcacggttatcgcgacgggaccgctgacttcggatgccctggcagaaaaaattcacgcgctaaatggtggcgacggattctatttttacgatgcagcagcgcctatcattgataaatctaccattgatatgagcaaggtttaccttaaatctcgctacgataaaggcgaagctgcttacctcaactgccctatgaccaaagaagaattcatggctttccatgaagctctgacaaccgcagaagaagccccgctgaatgcctttgaaaaagaaaagtattttgaaggctgtatgccgattgaagttatggctaaacgtggcattaaaaccatgctttatggacctatgaaacccgttggattggaatatccagatgactatacaggtcctcgcgatggagaatttaaaacgccatatgccgtcgtgcaattgcgtcaagataatgcagctggaagcctttataatatcgttggtttccaaacccatctcaaatggggtgagcaaaaacgcgttttccaaatgattccagggcttgaaaatgctgagtttgtccgctacggcgtcatgcatcgcaattcctatatggattcaccaaatcttttaaccgaaaccttccaatctcggagcaatccaaaccttttctttgcaggtcagatgactggagttgaaggttatgtcgaatcagctgcttcaggtttagtagcaggaatcaatgctgctcgtttgttcaaaagagaagaagcacttatttttcctcagacaacagctattgggagtttgcctcattatgtgactcatgccgacagtaagcatttccaaccaatgaacgtcaactttggcatcatcaaagagttagaaggcccacgcattcgtgacaaaaaagaacgttatgaagctattgctagtcgtgctttggcagatttagacacctgcttagcgtcgctttaa

SEQ ID NO: 662 - protein, 448 aa, Streptococcus pyogenes
MSQSTATYINVIGAGLAGSEAAYQIAKRGIPVKLYEMRGVKATPQHKTTNFAELVCSNSFRGDSLTNAVGLLKEEMRRLDSIIMRNGEANRVPAGGAMAVDREGYAESVTAELENHPLIEVIRGEITEIPDDAITVIATGPLTSDALAEKIHALNGGDGFYFYDAAAPIIDKSTIDMSKVYLKSRYDKGEAAYLNCPMTKEEFMAFHEALTTAEEAPLNAFEKEKYFEGCMPIEVMAKRGIKTMLYGPMKPVGLEYPDDYTGPRDGEFKTPYAVVQLRQDNAAGSLYNIVGFQTHLKWGEQKRVFQMIPGLENAEFVRYGVMHRNSYMDSPNLLTETFQSRSNPNLFFAGQMTGVEGYVESAASGLVAGINAARLFKREEALIFPQTTAIGSLPHYVTHADSKHFQPMNVNFGIIKELEGPRIRDKKERYEAIASRALADLDTCLASL

SEQ ID NO: 663 - DNA, 1632 bp, Streptococcus pyogenes
gtgtcagtaaattggcaagacattgcatttcatttctttggaggcttaggtctctttcttttcagtatcaagtatatgggagatggtctgcaacaagcagcaggagataaactaaggtattacattgataaatacaccagtaatcccttttttggtatcttagtcggaattgccatgtctgccttaattcagtccagttcaggcgtaactgtaattacggttggtttggtttctgcgggtttgctaaatttgcgacaagccattggaattgttatgggggctaatattggaacgactatcacttcgtttttaattggttttaaactaggagattacgccttgcccatgatttttattggtgcagcctgtcttttctttacctctaataaaaagctcaacaattttgggcgtatcatttttggtgtcggaggaattttcttctcgctgaacctaatgggagatgccatggatcctttgaaatctgtgtcagcctttcaaaattatttagcgacattaggtgataaacccttccaaggtgtctttatcggaacggctttgaccatgttgattcagtcatcggcagccattatcgggattttacagggactgttttcaggcggtcttttgaccttacagggggctattcctattttgttaggctcaaatataggaacctgcattacagctgtcttagcagctataggttcaaatattgctgctaaacgtgtggcagcagctcatgtgttatttaatttgatcggtacaattatttttatgattatcctagtcccattcacatcattgatgttatggctacaatcaaagttgagtttaacgcctgagatgactatcgctttttctcacggttcttttaatatcactaataccatcttattaattcctttcattagtctactagctatgattgtgactagactcattccaggagaagatgaagtggtcaaatacgaagccctttatttagatcgcttacttattacccaagccccttctatcgcactaggaaatgcccacaaggaattggttcatttagcctcttatgcgattcaagcttttgaagcttcttacagttatattatgacagctgacggtaaatttggggaaaaggtcaagcgttatgaaagagcagttgataccatcgatgaggagttaaccacttatttggttgatatttctaacgaagccctcagcccaagtgaaaatgaagtcttggctggtattcttgactcttcacgtgatttggaaagaattggagatcattctgagtctttaggcattctaattgaaggcatcatatctaaacaaattggtttttcaatatctgctcgtcaagaattgacagagatgtatcaattgacgcattgtttaacactggatgccattagagctatcgttgatagtgatacagacttggcgcaaactattgtgactcgccataaagaaattgaagaaaaagagcgacgattacgtaaaacccacattaagcgcttgaattgtggagaatgtacggcacaagcaggtattaattttattgatattatttcccactatacccgcatcacagatcatgccttgaatttagcagagaaagtactttcacaccagctttaa

SEQ ID NO: 664 - protein, 543 aa, Streptococcus pyogenes
MSVNWQDIAFHFFGGLGLFLFSIKYMGDGLQQAAGDKLRYYIDKYTSNPFFGILVGIAMSALIQSSSGVTVITVGLVSAGLLNLRQAIGIVMGANIGTTITSFLIGFKLGDYALPMIFIGAACLFFTSNKKLNNFGRIIFGVGGIFFSLNLMGDAMDPLKSVSAFQNYLATLGDKPFQGVFIGTALTMLIQSSAAIIGILQGLFSGGLLTLQGAIPILLGSNIGTCITAVLAAIGSNIAAKRVAAAHVLFNLIGTIIFMIILVPFTSLMLWLQSKLSLTPEMTIAFSHGSFNITNTILLIPFISLLAMIVTRLIPGEDEVVKYEALYLDRLLITQAPSIALGNAHKELVHLASYAIQAFEASYSYIMTADGKFGEKVKRYERAVDTIDEELTTYLVDISNEALSPSENEVLAGILDSSRDLERIGDHSESLGILIEGIISKQIGFSISARQELTEMYQLTHCLTLDAIRAIVDSDTDLAQTIVTRHKEIEEKERRLRKTHIKRLNCGECTAQAGINFIDIISHYTRITDHALNLAEKVLSHQL

SEQ ID NO: 665 - DNA, 1629 bp, Streptococcus pyogenes
gtgtcaaaatacctaaaatacttctctattatcacgttatttttgactgggcttattttagttgcatgtcaacaacaaaagcctcaaacaaaagaacgtcagcgcaaacaacgtccaaaagacgaacttgtcgtttctatgggggcaaagctccctcatgaattcgatccaaaggaccgttatggagtccacaatgaagggaatatcactcatagcactctattgaaacgttctcctgaactagatataaaaggagagcttgctaaaacataccatctctctgaagatgggctgacttggtcgtttgacttgcatgatgattttaaattctcaaatggtgagcctgttactgctgatgatgttaagtttacttatgatatgttgaaagcagatggaaaggcttgggatctaaccttcattaagaacgttgaagtagttgggaaaaatcaggtcaatatccatttgactgaggcgcattcgacatttacagcacagttgactgaaatcccaatcgtccctaaaaaacattacaatgataagtataagagcaatcctatcggttcaggaccttacatggtaaaagaatataaggctggagaacaagctatttttgttcgtaacccttattggcatgggaaaaaaccatactttaaaaaatggacttgggtcttacttgatgaaaacacagcactagcagctttagaatctggtgatgttgatatgatctacgcaacgccagaacttgctgataaaaaagtcaaaggcacccgcctccttgatattccatcaaatgatgtgcgcggcttatcattaccttatgtgaaaaagggcgtcatcactgattctcctgatggttatcctgtaggaaatgatgtcactagtgatccagcaatccgaaaagccttgactattggtttaaataggcaaaaagttctcgatacggttttaaatggttatggtaaaccagcttattcaattattgataaaacaccattttggaatccaaaaacagccattaaagataataaagtagctaaagctaagcaattattgacaaaagcgggatggaaagaacaagcagacggtagccgtaaaaaaggtgaccttgatgcagcgtttgatctgtactaccctactaatgatcaattgcgagcgaacttagccgttgaagtagcagagcaagccaaggccctagggattactattaaactcaaagctagtaactgggatgaaatggcaacgaagtcacatgactcagccttactttatgccggaggacgtcatcacgcgcagcaattttatgaatcgcatcatccaagcctagcagggaaaggttggaccaatattacgttttataacaatcctaccgtgactaagtaccttgacaaagcaatgacatcttctgaccttgataaagctaacgaatattggaagttagcgcagtgggatggcaaaacaggtgcttctactcttggagatttgccaaatgtatggttggtgagccttaaccatacttatattggtgataaacgtatcaatgtaggtaaacaaggcgtccacagtcatggtcatgattggtcattattgactaacattgccgagtggacttgggatgaatcaactaagtaa

SEQ ID NO: 666 - protein, 542 aa, Streptococcus pyogenes
MSKYLKYFSIITLFLTGLILVACQQQKPQTKERQRKQRPKDELVVSMGAKLPHEFDPKDRYGVHNEGNITHSTLLKRSPELDIKGELAKTYHLSEDGLTWSFDLHDDFKFSNGEPVTADDVKFTYDMLKADGKAWDLTFIKNVEVVGKNQVNIHLTEAHSTFTAQLTEIPIVPKKHYNDKYKSNPIGSGPYMVKEYKAGEQAIFVRNPYWHGKKPYFKKWTWVLLDENTALAALESGDVDMIYATPELADKKVKGTRLLDIPSNDVRGLSLPYVKKGVITDSPDGYPVGNDVTSDPAIRKALTIGLNRQKVLDTVLNGYGKPAYSIIDKTPFWNPKTAIKDNKVAKAKQLLTKAGWKEQADGSRKKGDLDAAFDLYYPTNDQLRANLAVEVAEQAKALGITIKLKASNWDEMATKSHDSALLYAGGRHHAQQFYESHHPSLAGKGWTNITFYNNPTVTKYLDKAMTSSDLDKANEYWKLAQWDGKTGASTLGDLPNVWLVSLNHTYIGDKRINVGKQGVHSHGHDWSLLTNIAEWTWDESTK

SEQ ID NO: 667 - DNA, 1260 bp, Streptococcus pyogenes
gtgcctatttttaaaaaaactttaattgttttatcctttatttttttgatatctatcttgatttatctaaatatgtatctatttggaacatcaactgtaggaatttatggagtaatattaataacctatctagttattaaacttggattatctttcctttatgagccatttaaaggaaagccacatgactataaagttgctgctgtaattccttcttataatgaagatgccgagtcattattagaaactcttaaaagtgtgttagcacagacctatccgttatcagaaatttatattgttgatgatgggagttcaaacacagatgcaatacaattaattgaagagtatgtaaatagagaagtggatatttgtcgaaacgttatcgttcaccgttcccttgtcaataaaggaaaacgccatgctcaagcgtgggcatttgaaagatctgacgctgacgtttttttaaccgtagattcagatacttatatctatccaaatgccttagaagaactcctaaaaagcttcaatgatgagacagtttatgctgcaacaggacatttgaatgctagaaacagacaaactaatctattaacgcgacttacagatatccgttacgataatgcctttggggtggagcgtgctgctcaatcattaacaggtaatattttagtttgctcaggaccattgagtatttatcgacgtgaagtgattattcctaacttagagcgctataaaaatcaaacattcctaggtttacctgttagcattggggatgatcgatgtttaacaaattatgctattgatttaggacgcactgtctaccaatcaacagctagatgtgatactgatgtacctttccaattaaaaagttatttaaagcaacaaaatcgatggaataaatctttttttaaagaatctattatttctgttaaaaaaattctttctaatcccatcgttgccttatggactattttcgaagtcgttatgtttatgatgttgattgtcgcaattgggaatcttttgtttaatcaagctattcaattagaccttattaaactttttgcctttttatccatcatctttatcgttgctttatgtcgtaatgttcattatatgatcaaacatcctgctagttttttgttatctcctctgtatggaatattacacttgtttgtcttacagcccctaaaactttattctttatgcaccattaaaaatacggaatggggaacacgtaaaaaggtcactatttttaaataa

SEQ ID NO: 668 - protein, 419 aa, Streptococcus pyogenes
MPIFKKTLIVLSFIFLISILIYLNMYLFGTSTVGIYGVILITYLVIKLGLSFLYEPFKGKPHDYKVAAVIPSYNEDAESLLETLKSVLAQTYPLSEIYIVDDGSSNTDAIQLIEEYVNREVDICRNVIVHRSLVNKGKRHAQAWAFERSDADVFLTVDSDTYIYPNALEELLKSFNDETVYAATGHLNARNRQTNLLTRLTDIRYDNAFGVERAAQSLTGNILVCSGPLSIYRREVIIPNLERYKNQTFLGLPVSIGDDRCLTNYAIDLGRTVYQSTARCDTDVPFQLKSYLKQQNRWNKSFFKESIISVKKILSNPIVALWTIFEVVMFMMLIVAIGNLLFNQAIQLDLIKLFAFLSIIFIVALCRNVHYMIKHPASFLLSPLYGILHLFVLQPLKLYSLCTIKNTEWGTRKKVTIFK

SEQ ID NO: 669 - DNA, 1494 bp, Streptococcus pyogenes
ttgatagaaaaatacttggaatcatcaatcgaatcaaaatgtcagttaattgtcttgttttttaagacatcttatttgccaataactgaggtagcagaaaaaactggcttaacctttttacaactaaaccattattgtgaggaactgaatgcctttttccctggtagtctgtctatgaccatccaaaaaaggatgatatcttgccaatttacacatccttttaaagaaacttatctttaccaactctatgcatcatctaatgtcttacaattactagcctttttaataaaaaatggttcccactctcgtccccttacggattttgcaagaagtcattttttatcaaactcctcagcttatcggatgcgcgaagcattgattcctttattaagaaactttgaattaaaactctctaagaacaagattgtcggtgaggaatatcgcatccgttacctcatcgctctgctatatagtaagtttggcattaaagtttatgacttgacgcagcaagacaaaaacactattcatagctttttatcccatagttccacccaccttaaaacctctccttggttatcggaatcgttttctttctatgacattttattagctttatcgtggaagcggcatcaattttcggtaactattccccaaaccagaatttttcaacaattaaaaaaactttttgtctacgattctttgaaaaaaagtagccatgatattatcgaaacttactgccaactaaacttttcagcaggagatttggactacctctatttaatttatatcaccgctaataattcttttgcgagcttacaatggacacctgagcatatcagacaatattgtcaactttttgaagaaaatgatacttttcgcctgcttttaaatcctatcatcactcttttacctaacctaaaagagcaaaaggctagtttagtaaaagctcttatgtttttttcaaaatcattcttgtttaatctgcaacattttattcctgagaccaacttattcgtttctccgtactataaaggaaaccaaaaactctatacgtccttaaagttaattgtcgaagagtggatggccaaacttcctggtaagcgtgacttgaaccataagcattttcatcttttttgccactatgtcgagcaaagtctaagaaatatccaacctcctttagttgttgttttcgtagccagtaattttatcaatgctcatctcctaacggattcttttccaaggtatttctcggataaaagcattgattttcattcctattatctattgcaagataatgtttatcaaattcctgatttaaagccagatttggtcatcactcacagtcaactgattccttttgttcaccatgaacttacaaaaggaattgctgttgctgaaatatcttttgatgaatcgattctgtctatccaagaattgatgtatcaagttaaagaggaaaaattccaagctgatttaaccaagcaattaacataa

SEQ ID NO: 670 - protein, 497 aa, Streptococcus pyogenes
MIEKYLESSIESKCQLIVLFFKTSYLPITEVAEKTGLTFLQLNHYCEELNAFFPGSLSMTIQKRMISCQFTHPFKETYLYQLYASSNVLQLLAFLIKNGSHSRPLTDFARSHFLSNSSAYRMREALIPLLRNFELKLSKNKIVGEEYRIRYLIALLYSKFGIKVYDLTQQDKNTIHSFLSHSSTHLKTSPWLSESFSFYDILLALSWKRHQFSVTIPQTRIFQQLKKLFVYDSLKKSSHDIIETYCQLNFSAGDLDYLYLIYITANNSFASLQWTPEHIRQYCQLFEENDTFRLLLNPIITLLPNLKEQKASLVKALMFFSKSFLFNLQHFIPETNLFVSPYYKGNQKLYTSLKLIVEEWMAKLPGKRDLNHKHFHLFCHYVEQSLRNIQPPLVVVFVASNFINAHLLTDSFPRYFSDKSIDFHSYYLLQDNVYQIPDLKPDLVITHSQLIPFVHHELTKGIAVAEISFDESILSIQELMYQVKEEKFQADLTKQLT

SEQ ID NO: 671 - DNA, 1776 bp, Streptococcus pyogenes
gtgaaccaaggaaaaataataaccgtttcgggacctcttgttgtggcttctgggatgcaagaagctaatattcaagatatttgtcgtgtgggacatcttggcttagtcggagaaattattgaaatgcgtcgcgatcaagcgtctattcaggtttatgaggaaacatcagggatcggtccaggagaaccagtagtgactactggttgtcctttgtcggtcgagttaggcccgggcctgatttcagaaatgtttgacggtattcagcgaccgcttgatcgttttcaaaaagcaacggacagcgactttttaatccgtggtgtggctatcccaagtcttgatcgaaaggctaagtgggcatttattcccaagctaagtgttggtcaagaagtagttgcaggtgatattttaggaactgtgcaagaaacagctgtcattgagcaccgtatcatggttccttataaagtttcagggaccttggtggctattcatgcaggggacttcacagtaacagatacagtttatgaaattaagcaggaagacggttccatttaccaaggtagcctcatgcagacttggccagttcgtcaaagtcgccctgttgctcaaaagcttatcccagtcgaacctttggttacaggtcaacgggttattgacacctttttccctgttacaaaaggtggtgccgctgccgttcctggaccatttggggcaggaaaaacagttgtgcagcatcaaatagctaaatttgccaacgttgatattgttatttatgtcggttgtggggaacgcggcaacgagatgaccgacgttttgaatgagtttccagagttaattgacccaaatacaggccagtccattatggagcgcacggtgttaattgcaaacacctctaatatgccagtagcagcgcgtgaagcgtcgatttacacaggtattaccattgccgaatatttccgtgatatgggctattctgtggctatcatggcagactcgacatcacgttgggcagaagctctgcgcgagatgtcaggacgcctacaagaaatgcctggtgatgaaggctacccggcttacttagggagtcgtattgccgaatattatgaacgggctggtcgtgttcggaccttgggaagtcaagaacgtgagggaaccattacagccatcggcgcggtttctcctcctggaggggatatttcagagcctgtcactcaaaacacccttcggattgtcaaagttttctgggggctcgacgcgcctcttgcgcaacggcgtcacttcccagcgattaactggctgacgtcttattcattgtatcaagatgatgtaggaagctatattgaccgtaaacagcaatctaattggtccaacaaggtaactcgtgccatggctattttgcagcgtgaagccagtctagaagaaattgtacgcttggtggggcttgattcactgtctgaacaagatcgtttgaccatggctgttgcccggcaaattcgggaggattatctccagcaaaatgcctttgattcggtggatacctttacttcctttccgaaacaagaggccatgctaaccaatattttgacctttaatgaggaagccagcaaagccctttctttgggagcttattttaatgagattatggaaggcactgctcaggtacgcgatcgcatcgcacgcagcaaatttatcccagaagaaaacttagagcagattaaagggcttactcagaaggttaccaaagagattcaccacgttttagcaaagggaggaatttag

SEQ ID NO: 672 - protein, 591 aa, Streptococcus pyogenes
MNQGKIITVSGPLVVASGMQEANIQDICRVGHLGLVGEIIEMRRDQASIQVYEETSGIGPGEPVVTTGCPLSVELGPGLISEMFDGIQRPLDRFQKATDSDFLIRGVAIPSLDRKAKWAFIPKLSVGQEVVAGDILGTVQETAVIEHRIMVPYKVSGTLVAIHAGDFTVTDTVYEIKQEDGSIYQGSLMQTWPVRQSRPVAQKLIPVEPLVTGQRVIDTFFPVTKGGAAAVPGPFGAGKTVVQHQIAKFANVDIVIYVGCGERGNEMTDVLNEFPELIDPNTGQSIMERTVLIANTSNMPVAAREASIYTGITIAEYFRDMGYSVAIMADSTSRWAEALREMSGRLQEMPGDEGYPAYLGSRIAEYYERAGRVRTLGSQEREGTITAIGAVSPPGGDISEPVTQNTLRIVKVFWGLDAPLAQRRHFPAINWLTSYSLYQDDVGSYIDRKQQSNWSNKVTRAMAILQREASLEEIVRLVGLDSLSEQDRLTMAVARQIREDYLQQNAFDSVDTFTSFPKQEAMLTNILTFNEEASKALSLGAYFNEIMEGTAQVRDRIARSKFIPEENLEQIKGLTQKVTKEIHHVLAKGGI

SEQ ID NO: 673 - DNA, 1728 bp, Streptococcus pyogenes
ttggaaacgatattacaaacaaaattaccagtagctcaactggtggagcagctaacggagtggctaactaaaactttctcaggtctatttgatattatgcaagtagttggtagctttttgatggattggatgaccaaaacacttttatttatccacccgttactttttattgttctagtaacagcagggatgtttttccttgctaagaaaaaatggcctttgccaacctttaccttgttaggattgctctttatttacaatcaagggttatggaagcagctaatgaatacctttactctggtgttagtagctagtttgatttcggtacttattggtattccgctggggatttggatggctaaaaatgccactgtccgtcagattgtgaatcctattttggactttatgcaaaccatgccggcttttgtttacttgattcctgccgttgccttttttggtattggtatggtgcctggagtatttgcttcagtcatctttgccttaccaccaacggttcgtttcacaaatttggccattcgtgacattccaacagaattgattgaggcctcagatgcctttgggtcaactgggaaacaaaagctctttaaagtggaattgcctttagctaaaaatactattatggcaggtgttaatcagaccatgatgttagccctttccatggtagtaacaggctccatgattggtgctcctggtttaggacgtgaagtcttgtcagcccttcaacacgctgatattggtagtggatttgtcagtggtcttgccttggttatcttggcgattgtgcttgaccgtatgacacagttgttcaatagcaaacctcaagaaaaagccaaagctggcaaaaccaataaatggattggtttagcagcccttgctgtctttttgatagctgctttaggacgcggtattatggctatgacttctggtatggcagataagggtgaaactgttaacatcgcttacgtgcagtgggattctgaggttgcctcaactcatgtgattgcagaagttttgaaaaacgaaggttaccatgtgaccttgactccgcttgacaatgccgttatgtggcaaaccgttgcaaatgggaacgctgatttttcaactagtgcttggttgccagtcacccatggccaacaatatcagaaatacaagtcaaaattagatgatttaggacctaacctaaaagggaccaaacttggtttagctgttccaaaatacatgacagatgtcaatagtattgaggacttaagcaaacaagccgatcaaaaaatcacagggatcgaaccaggtgcaggtatcatggcagcagcccaaaagactctaaaagagtatcataatctatctagttgggagttagtggcggcatcaacaggagccatgacgacttccttggatcaagcgatcaagaaaaaagatcctattgttgtgacagcttggtcaccacactggatgtttgccaagtatgacttgaagtaccttaaagatcctaaagaaatctttggctcgactgagaacatcaataccattgctcgtaaaggcttgaaaaaagaacttccaaatgtctacaaaatcattgataagttccactggacccaaaaagatatggaagcagtcatgcttgacatcaacaaaggcatgagtccagaagctgccgccaaaaaatgggtagaggcaaacaaatctaaagtatcaagttggacaaaataa

SEQ ID NO: 674 - protein, 575 aa, Streptococcus pyogenes
METILQTKLPVAQLVEQLTEWLTKTFSGLFDIMQVVGSFLMDWMTKTLLFIHPLLFIVLVTAGMFFLAKKKWPLPTFTLLGLLFIYNQGLWKQLMNTFTLVLVASLISVLIGIPLGIWMAKNATVRQIVNPILDFMQTMPAFVYLIPAVAFFGIGMVPGVFASVIFALPPTVRFTNLAIRDIPTELIEASDAFGSTGKQKLFKVELPLAKNTIMAGVNQTMMLALSMVVTGSMIGAPGLGREVLSALQHADIGSGFVSGLALVILAIVLDRMTQLFNSKPQEKAKAGKTNKWIGLAALAVFLIAALGRGIMAMTSGMADKGETVNIAYVQWDSEVASTHVIAEVLKNEGYHVTLTPLDNAVMWQTVANGNADFSTSAWLPVTHGQQYQKYKSKLDDLGPNLKGTKLGLAVPKYMTDVNSIEDLSKQADQKITGIEPGAGIMAAAQKTLKEYHNLSSWELVAASTGAMTTSLDQAIKKKDPIVVTAWSPHWMFAKYDLKYLKDPKEIFGSTENINTIARKGLKKELPNVYKIIDKFHWTQKDMEAVMLDINKGMSPEAAAKKWVEANKSKVSSWTK

SEQ ID NO: 675 - DNA, 1335 bp, Streptococcus pyogenes
gtgaaaaagtatttaaatcaaaatgtttatgatgcattgatagaaagattacattttttgtttaatgattttcctattgtctatatttccttctcaggtggaaaagatagtgggttacttcttaatattttactggattttagagataaatattatccggatagagaaataggtgtgtttcatcaagattttgaagcacagtacagtttaacaacaaaatatgttcaagaaacattcacttctttagaaggtagaaaaaaagtttctttgtattgggtgtgcttaccgatggctactagaactgcacttagtagttatgaaatgttttggtatccgtgggatgacaaaacagaagatatctgggtaagaccaatgccatctcaagattatgttattaatttggaaaataattcaattactacttatcgttataaaatgaatcaggaggatttagcgaaacaatttggtaggtggtataaacaaattcacggaaatcaaaaaacagtttgtatattaggaaaccgtgcttcagaatccttacacagatatagtggttttatcaataaaaagtatggttatcaaaaggaatgctggattaccaaacaattcaaagatgtctggacagcatctcccttatatgattggtcagtggaagacatatggcatgcttactataagttttcttattcttataacgaactttatgatctattttataaagcgggtttaaaaccatcacaaatgagagttgcatctccttttcaagactatgctgttgatagcctaaatctttatagaataatagatcaagaaacttgggtaaagcttttgggacgtgttcaaggagttaacttttcgaatatttatggacgtactaaagcaatgggatataaatcaattgctttaccaaagggtcattcgtggaagtcgtatactcagtttcttttatcaacgctaccagtgaggttaagaaataattatgttagaaaatttaataaatcaatagacttttggcataaaacaggcggaggacttgcggaggaaacaattaatgaactaattgaaaaaggatatcgtattgctagaaatggtatttcaaattatacctcttttaaacattcaagggttatttttttagatcaaattcctgatgatacagacgatattgtaacaacaaaggatataccaagctggaaacgaatgtgtttctgtattttaaaaaacgatcatatttgtcgaactatggggtttggtttgacaagagagcaacaaaaaatagtagcctttttaaaagagaaatataagacgagtttaaaggagttagaaagtgagtaa

SEQ ID NO: 676 - protein, 444 aa, Streptococcus pyogenes
MKKYLNQNVYDALIERLHFLFNDFPIVYISFSGGKDSGLLLNILLDFRDKYYPDREIGVFHQDFEAQYSLTTKYVQETFTSLEGRKKVSLYWVCLPMATRTALSSYEMFWYPWDDKTEDIWVRPMPSQDYVINLENNSITTYRYKMNQEDLAKQFGRWYKQIHGNQKTVCILGNRASESLHRYSGFINKKYGYQKECWITKQFKDVWTASPLYDWSVEDIWHAYYKFSYSYNELYDLFYKAGLKPSQMRVASPFQDYAVDSLNLYRIIDQETWVKLLGRVQGVNFSNIYGRTKAMGYKSIALPKGHSWKSYTQFLLSTLPVRLRNNYVRKFNKSIDFWHKTGGGLAEETINELIEKGYRIARNGISNYTSFKHSRVIFLDQIPDDTDDIVTTKDIPSWKRMCFCILKNDHICRTMGFGLTREQQKIVAFLKEKYKTSLKELESE

SEQ ID NO: 677 - DNA, 1509 bp, Streptococcus pyogenes
ttgttagattattatttggaatccgatattattgaccagaaaatcctactggctattttgttgacagaaaaagaactgacgatggcagcagcttgttctcaaacaactttgactgctttaaaaataaagcagtatcttcgacaatttaacgccttatttaaagggtacttacgtattgagcttattaaatctcgtatttattgtgaggtattaaatgataagcgagaagcatttttttatgacatttttgccttatcagatactctaaaaatgttgacattcttattactagataatcccaaacacaaatcaatcgctgtttatacacgaaaacaagggatatcccagtcaaaagcttatcgtcttattcataaattaaaacattatttacaagacattggtttaaatattgtagacaatactgttatcggagatgaacttaaaatacggtatttgattgctcttttacataaagagtacggcattatattatatgatatacaacctgcagacattgaaacgattcatgcttttatctttgcagcacaaaaaaacttacaaccttctgcctttttagatagacgcttcttgttttttgatgtgctgttgatgttgacttggaagcgccatcgctatcctgttcatttgcctcatttagctctttttgaacatctcaaatccttgcctatttttgacaatatcaaaaccattgccgtggatgagctagcacctcgaactcgtgtcacattttcgtctgatgattttgactatctctttttaatttatttaacgactgataactccttcttgagtgggtactggacaagtcatcagcgacaacaactttaccatttaatcaccaaagatcccgattatcatttactaatccatcgtcttcaggcactagttggaaaatattccgatattcatgagcatatccctaacttaattccttttttcaaaagaactctctacaatttacaaactttaattacctttgatggttattattttgatcaatatcaaggcaacatgctactactagataagcttgaaaccgttatcaaagattggctttatgacacaggccgtcaaggcagtattagttctggtcacttacacttgatgtgtttataccttgagcagatcttggaaagctctattgctccaatcaatattactgttattgagagccaagaaactgttggtaacgttatagctaatttcatcacctcaactatcccttcttacaaagttaaactgtcacgggtcaatatcttatctgataatatttatccctatgataaacctgtagatctggttgtaaccagtcagaagctcttgcctttcttaaaagaactcggtgtttttcccaaagagacccgcttgtttggtttgagtttggactgtatccaacagcagcgcgaagatttaatcaaaaccatcttagccttgcaccagaaccactaccaaaaacgtttagaagaactttggagagttccttcttaa

SEQ ID NO: 678 - protein, 502 aa, Streptococcus pyogenes
MLDYYLESDIIDQKILLAILLTEKELTMAAACSQTTLTALKIKQYLRQFNALFKGYLRIELIKSRIYCEVLNDKREAFFYDIFALSDTLKMLTFLLLDNPKHKSIAVYTRKQGISQSKAYRLIHKLKHYLQDIGLNIVDNTVIGDELKIRYLIALLHKEYGIILYDIQPADIETIHAFIFAAQKNLQPSAFLDRRFLFFDVLLMLTWKRHRYPVHLPHLALFEHLKSLPIFDNIKTIAVDELAPRTRVTFSSDDFDYLFLIYLTTDNSFLSGYWTSHQRQQLYHLITKDPDYHLLIHRLQALVGKYSDIHEHIPNLIPFFKRTLYNLQTLITFDGYYFDQYQGNMLLLDKLETVIKDWLYDTGRQGSISSGHLHLMCLYLEQILESSIAPINITVIESQETVGNVIANFITSTIPSYKVKLSRVNILSDNIYPYDKPVDLVVTSQKLLPFLKELGVFPKETRLFGLSLDCIQQQREDLIKTILALHQNHYQKRLEELWRVPS

SEQ ID NO: 679 - DNA, 1227 bp, Streptococcus pyogenes
ttgctagacgcaaaagacatcaaacaagactttcaaatcttaaatcaacaagtcaatgatgaaccccttgtttatttggataatgccgccaccacacaaaaaccggcgcttgttcttgaggctttgcaatcctattatcaagaagataatgctaatgtccaccgaggagttcataccttggctgaacgtgcaacgctcaaatatgaggccagtcgccagcaggttgctgactttattcatgctaaatcaagtaaggaagtgctctttaccagaggaacaacaaccagtttgaattgggttgctcggtttgcagagcaggtcttgacgccagaagatgaggtgttgatttcgattatggagcatcatgccaatatcattccttggcaacaagcctgtcaaaaaacaggagcaaggttagtctatgtttatttaaaagatggccaacttgacatggacgatttggcaaacaaattgacgacaaaaacacgttttgttagcctagtacatgtctccaatgttcttggttgcatcaatcccattaaagaaattgccaagctggcacatgctaaaggagcctaccttgttgttgacggtgcccagtcggttccacatttggctattgatgttcaagacttggattgtgatttctttgctttttcagctcataagatgttggggccaacaggtttgggtgttctttacggcaaagaagagcttttgaatcaagtggagcctcttgaatttggcggagaaatgattgattttgtttacgaacaagaggccacttggaaagaattgccctggaagtttgaagcaggaacacctcacatagctggtgctattgggctaagcgcagccatttcttaccttcagagactaggcatggctgatatacatgcgcatgaagcagaactaatagcctatgtcttgccgaaattagaagctattgaggggcttaccatatatggaccaagccagcctagtgcaagatctggtctgatttcttttaatctggatgatttgcatcctcatgacttggcaacagccttggactatgaaggtgttgcagtaagagcagggcaccactgcgcccaacctcttcttagttatttaggtgtaccagcaactgttagagcaagtttttatatctataacaccaaggcagattgtgaccgtctagtcgaagcaattctaaaagcaaaggagtttttcaatggcactctctaa

SEQ ID NO: 680 - protein, 408 aa, Streptococcus pyogenes
MLDAKDIKQDFQILNQQVNDEPLVYLDNAATTQKPALVLEALQSYYQEDNANVHRGVHTLAERATLKYEASRQQVADFIHAKSSKEVLFTRGTTTSLNWVARFAEQVLTPEDEVLISIMEHHANIIPWQQACQKTGARLVYVYLKDGQLDMDDLANKLTTKTRFVSLVHVSNVLGCINPIKEIAKLAHAKGAYLVVDGAQSVPHLAIDVQDLDCDFFAFSAHKMLGPTGLGVLYGKEELLNQVEPLEFGGEMIDFVYEQEATWKELPWKFEAGTPHIAGAIGLSAAISYLQRLGMADIHAHEAELIAYVLPKLEAIEGLTIYGPSQPSARSGLISFNLDDLHPHDLATALDYEGVAVRAGHHCAQPLLSYLGVPATVRASFYIYNTKADCDRLVEAILKAKEFFNGTL

SEQ ID NO: 681 - DNA, 1575 bp, Streptococcus pyogenes
ttggctttgaccgattttaaggataaagaccaacaagatcagcagcgaagctttaaagagcagattcttgctgagttggaaaaagcaaatcaaatcagaaaagaaaaagaggaagaactttttcaaaaagagttggaagctaaagaagcagctaggagaacggcccagctatatgctgaatataaaagacaagatgcttttcaaaaagagtctatagcacataacaataagacagctaaacactttcaagctataaaaggtgcggtaatgacttcagaagcgcttaaaccgactttactttctgaaaaagaaaactcatctttaaaaacgacaaataagagagtcgtgcaggcaaatgagcttcaagagactgcctctaaagaatctcaagtaccgttaactattgagaaaggtcattcagtgagacgaaaattaagcaaacgccaacagactgagcgagctgctaaaaagatttcaaccgttttgattagttctattattataacccttttggctgttactctagcaggagcaggctatgtttatagtgctttaaatcctgttgataaaaatagtgatgcctttgttcaagttgagattccatctgggtcaggcaataaattgattggtcaaattcttcaaaaaaaaggtttaatcaagaatagcactgtttttagtttttatacaaaatttaaaaactttacaaattttcagagcgggtattataatctgcaaaaaagtatgagtctagaagaaattgctagtgctttacaagaaggtggtacagcagaacctaccaagccatctcttgggaagatcttgattccagaaggatacacgattaaacaaatagctaaagctgttgagcataatagcaagggaaagaccaaaaaagctaaaacaccttttaacgagaaggattttttggatttagtcacggatgaggcttttattcaagatatggtaaaaagatatccaaaattattagcaactatcccaactaaagaaaaagctatttaccgtttggaaggttaccttttcccagcaacctataactattacaaagaaactaccatgagagaacttgtagaggacatgctggcagctatggatgctactttggtaccctattatgataaaattgctgctagtggtaagacagtcaacgaggtattgaccttggcctctttggttgaaaaagaaggttcaacagacgatgacagacgtcaaattgcaagtgtcttttataaccgccttaatagcggaatggcactacaatctaatatagctattttgtatgcgatggggaaacttggtgagaaaacaaccttggctgaggatgctactattgacaccaccattaattctccttataatatttataccaatacaggtctgatgcctggtccagttgctagctcgggggtttctgcaattgaagcaaccctaaatccagcctcaacggattatttatactttgtggccaatgtccatactggtgaagtttactatgcaaaaacatttgaagaacactctgcaaatgttgaaaaatatgtgaatagtcaaattcagtaa

SEQ ID NO: 682 - protein, 524 aa, Streptococcus pyogenes
MALTDFKDKDQQDQQRSFKEQILAELEKANQIRKEKEEELFQKELEAKEAARRTAQLYAEYKRQDAFQKESIAHNNKTAKHFQAIKGAVMTSEALKPTLLSEKENSSLKTTNKRVVQANELQETASKESQVPLTIEKGHSVRRKLSKRQQTERAAKKISTVLISSIIITLLAVTLAGAGYVYSALNPVDKNSDAFVQVEIPSGSGNKLIGQILQKKGLIKNSTVFSFYTKFKNFTNFQSGYYNLQKSMSLEEIASALQEGGTAEPTKPSLGKILIPEGYTIKQIAKAVEHNSKGKTKKAKTPFNEKDFLDLVTDEAFIQDMVKRYPKLLATIPTKEKAIYRLEGYLFPATYNYYKETTMRELVEDMLAAMDATLVPYYDKIAASGKTVNEVLTLASLVEKEGSTDDDRRQIASVFYNRLNSGMALQSNIAILYAMGKLGEKTTLAEDATIDTTINSPYNIYTNTGLMPGPVASSGVSAIEATLNPASTDYLYFVANVHTGEVYYAKTFEEHSANVEKYVNSQIQ

SEQ ID NO: 683 - DNA, 1212 bp, Streptococcus pyogenes
ttgacccctcgtagcggaaagaccacagctgggcattttcgttatgctaggtatctgattgagtcagaagatgaaaatcaccttgtgactgcttataatcaagaacaagcttatcgtttgtttatcgacggcgatggtacgggtttgatgcatatatttgacggtaactgtgaaataaaacacgacgagcgtggagatcacttgttaatcacgacaccaaaaggcaataagcgcgtttattataaaggcggcggtaaagttaacagtgttggtgctattacaggtatgtctttaggatcagtagtattctgcgagattaacttactgcacatggattttatccaggagtgttttaggcgtacttgggcggctaagctacgttatcatctagcagatttaaatcccccagcacctcaacatccagtaattaaagatgtctttgatgttcagaacacgaggtggactcattggaccatggatgataacccaatactaaccgcagagcgtaaacaaaacattatcaacagtcttaaaaaaaatccatatctatacaaacgagatgtacttggacagcgggtcatgcctcagggagttatttatggcctttttgacacggaaaaaaatgttttggatgctttgattggcgaaccagtagagatgtatttctgtgcagatggaggtcaatcagatgccacctctatgtcttgtaatatcgtaacaagagttagagataacggtaggataagcttcagacttaatcgtgtagctcactactaccacagcggagctgacactggccaagtaaaagctatgtcaacctacgctttagagttaaaagtttttatagactggtgcgttaaaaagtatcagatgcgctatacagaggtatttgtggatcctgcctgtaaatctttgagagaggagctgcataagttaggagtatttactctgggagctccgaacaattctaaagatgtatctagcaaagcaaaaggtattgaggtcggtatcgaacgcggccaaaacattatctcagatggcgctttttatcttgttaatcatagcgaagaagagtatgaccactaccactttttaaaagagatagggctgtacagtcgtgacgacaatggcaaacctattgataaagataaccatgccatggacgagtttagatacagcgtcaacgtgtttgtgcatcggtattacaactaa

SEQ ID NO: 684 - protein, 403 aa, Streptococcus pyogenes
MTPRSGKTTAGHFRYARYLIESEDENHLVTAYNQEQAYRLFIDGDGTGLMHIFDGNCEIKHDERGDHLLITTPKGNKRVYYKGGGKVNSVGAITGMSLGSVVFCEINLLHMDFIQECFRRTWAAKLRYHLADLNPPAPQHPVIKDVFDVQNTRWTHWTMDDNPILTAERKQNIINSLKKNPYLYKRDVLGQRVMPQGVIYGLFDTEKNVLDALIGEPVEMYFCADGGQSDATSMSCNIVTRVRDNGRISFRLNRVAHYYHSGADTGQVKAMSTYALELKVFIDWCVKKYQMRYTEVFVDPACKSLREELHKLGVFTLGAPNNSKDVSSKAKGIEVGIERGQNIISDGAFYLVNHSEEEYDHYHFLKEIGLYSRDDNGKPIDKDNHAMDEFRYSVNVFVHRYYN

SEQ ID NO: 685 - DNA, 1509 bp, Streptococcus pyogenes
ttggcaattaatgcacaagaaattagcgctttaattaaaaagcaaattgagaacttccagccaaatttcgatgtcacagaaactgggatcgttacctatattggtgacggtattgcacgtgcccgtggattagataatgccatgagtggtgaacttcttgaatttgaaaatggtgcctacgggatggctcaaaaccttgagtcaaatgatgtgggtattattattcttggtgatttttcagcaatccgtgaaggagatgtggttaagcgcaccggtaaaatcatggaagtaccagttggtgaagctctcattggacgtgtggtaaacccacttggacaaccagttgatggcttgggagatattgaaacaactggctttagaccagtagaaacgccagctcctggtgttatgcagcgtaaatccgtttctgaacccttacaaactggattaaaagcaattgatgctttggttccaattggtcgtgggcaacgtgagttgattatcggagaccgtcaaacaggaaaaacatccgtagctattgatgcgattttgaaccaaaaaggtcaagacatgatttgtatctatgtggctattggtcaaaaagaatcaaccgttcgtacacaagttgaaacccttcgccgttacggtgccttggattatactattgttgtgacagcgtcagcctcacaaccatcaccattgctctttatcgctccttatgcgggtgttgccatggctgaagaatttatgtaccaaggcaagcatgtcttgattgtctatgatgatttatcaaaacaagcggtggcttatcgtgaattgtctctcttgcttcgtcgtccaccaggtcgtgaggcttacccaggggatgttttctacttgcatagccgtcttttggaacgctctgcaaaagtttctgatgacttaggtggaggttctatcacagctctaccatttatcgaaacacaggccggagatatctctgcatatattgcgactaacgttatttcgattacagacggacaaatcttcttgcaagagaacctctttaattcaggaattcgtccagcgattgatgcaggatcatctgtctcacgtgtaggtggttccgctcaaattaaagcgatgaaaaaggttgctggtactcttcgtttggatttggcttcctatcgtgaattagaagcctttacccaatttggttcggaccttgatgctgcaacacaagcaaaacttaatcgtggtcgccgtacggttgaaatcttgaagcaaccattgcataaaccgttacctgttgaaaagcaagtcgttattctttatgcccttactcatggtttcttagatgatgttcctgtagatgatattttggcttttgaagaagctctttacgactactttgacgttcattacaatgatttatttgaaactatccgtaccacaaaagaccttcctgaagaagctgcccttgatgccgctattaaagcgtttaaagaacactcaaactttaagtcatag

SEQ ID NO: 686 - protein, 502 aa, Streptococcus pyogenes
MAINAQEISALIKKQIENFQPNFDVTETGIVTYIGDGIARARGLDNAMSGELLEFENGAYGMAQNLESNDVGIIILGDFSAIREGDVVKRTGKIMEVPVGEALIGRVVNPLGQPVDGLGDIETTGFRPVETPAPGVMQRKSVSEPLQTGLKAIDALVPIGRGQRELIIGDRQTGKTSVAIDAILNQKGQDMICIYVAIGQKESTVRTQVETLRRYGALDYTIVVTASASQPSPLLFIAPYAGVAMAEEFMYQGKHVLIVYDDLSKQAVAYRELSLLLRRPPGREAYPGDVFYLHSRLLERSAKVSDDLGGGSITALPFIETQAGDISAYIATNVISITDGQIFLQENLFNSGIRPAIDAGSSVSRVGGSAQIKAMKKVAGTLRLDLASYRELEAFTQFGSDLDAATQAKLNRGRRTVEILKQPLHKPLPVEKQVVILYALTHGFLDDVPVDDILAFEEALYDYFDVHYNDLFETIRTTKDLPEEAALDAAIKAFKEHSNFKS

SEQ ID NO: 687 - DNA, 1272 bp, Streptococcus pyogenes
gtggataaaataatcattgaaggtggtcaaacacgcttagaaggagaagttgttattgagggtgctaaaaacgcagttcttcctttactggcagcatctattttaccttcaaaaggaaaaacaattcttagaaacgttcctattctatctgatgtttttaccatgaataacgtggtacgtggtttagatattcgtgttgattttaatgaagcagctaacgaaatcacagttgatgcctcaggacacattttagatgaagccccttacgagtacgtgagccaaatgcgtgcctctattgttgttttaggaccaattttggcacgtaatggccacgcaaaagtatcaatgcctggaggctgtacgattggcagtaggcctattaatttgcacttaaaaggattagaggctatgggggcaacgattactcaaaaaggtggagatattaccgctcaagcagatcgactgcaaggtgccatgatttatatggacttcccatctgtaggagctacccaaaacttgatgatggctgccactttagctgatggtgtgaccactattgaaaatgctgctcgtgagcctgaaattgttgatttagctcaatttttgaataaaatgggagctagaattcgtggtgctggaacagagacgttaacgataacaggtgtcacgcatttacgaggcgtagaacatgatgttgttcaagatcgtatagaagccggtacatttatggttgcagcggcgatgacttcaggcaatgttttgattagagatgctgtttgggaacataatcgtccattgatttcaaaattaatggaaatgggtgtttctgtaacagaagaagaatacggtattcgcgttcaagcaaacacgccaaagctcaaacctgtaacggttaaaaccttgcctcatccaggttttccaacagacatgcaagctcaatttacagctttaatggcagtggtcaatggagagtctactatggttgaaactgtctttgaaaatcgatttcaacatctggaagaaatgcgacgcatgggcttacaatctgaaatccttagggaaactgccatgattcatggtggaagacaactgcaaggtgctcctgtgatgtcaacagatttacgtgccagtgctgcccttatcttgacagggattgttgctcaaggagttacaatagttaataatttggttcatttagatcgtggctactatcaatttcatgaaaaattagcaaagcttggagctactattagtcgtagcagtgaggtctag

SEQ ID NO: 688 - protein, 423 aa, Streptococcus pyogenes
MDKIIIEGGQTRLEGEVVIEGAKNAVLPLLAASILPSKGKTILRNVPILSDVFTMNNVVRGLDIRVDFNEAANEITVDASGHILDEAPYEYVSQMRASIVVLGPILARNGHAKVSMPGGCTIGSRPINLHLKGLEAMGATITQKGGDITAQADRLQGAMIYMDFPSVGATQNLMMAATLADGVTTIENAAREPEIVDLAQFLNKMGARIRGAGTETLTITGVTHLRGVEHDVVQDRIEAGTFMVAAAMTSGNVLIRDAVWEHNRPLISKLMEMGVSVTEEEYGIRVQANTPKLKPVTVKTLPHPGFPTDMQAQFTALMAVVNGESTMVETVFENRFQHLEEMRRMGLQSEILRETAMIHGGRQLQGAPVMSTDLRASAALILTGIVAQGVTIVNNLVHLDRGYYQFHEKLAKLGATISRSSEV

SEQ ID NO: 689 - DNA, 1260 bp, Streptococcus pyogenes
gtgaaagatgtcatttatgatgtggaagaagtgccaaaggcaggtatgttagttggtttgtcctttcagcacttatttgctatgtttggtgcgactgttctggttcccattctagttggaattgacccatcagttgctttgttatctagtggtttaggaacccttgcccacttatcagtgaccaaatttaaaattccagcctacatgggctcaagttttgcttatatagcagctatgcagttactgatgaagacaaatggtattggtgctgtagctcaaggggctatgacaggaggtctcgtttacctgattgtagctttgattgttaaagctattggcaatgattggattgataacatcttaccaccgattgtggttggtccgattgttatggtcattggtctaagcctagcttctacagctgttaatgatgtcatgctaaaaaatgggaactataatctgacttatcttgttattgggttagtcaccttattatcagttatttttttcaatatttatggtaagggaattgttgctattgtaccgcttttattagggctattagttggttatgttgtagcccttttagtgggtgttctcaccggtcaagaaattgttgattttaccaatgtggctcaggccaaatggtttagtatcccatcagtggaaattcctttcttaacctacggggttaaattctacccaagtgccattttaactatggcacccattgcctttgttacaatgacagaacattttggacacattatggtcttaaatagtttgacaaaaagagattatttcaaggatccaggacttgaaaagactttaactggtgatggttttgcgcaaatcattgccggcttcttaggggcacctccggtcacttcttatggtgaaaacatcggtgtaatggctttgaataaaatattctcggtctatgttattgcaggtgccgcagtgattgccgctctcctcagttttatcggtaaggtatcagccttaattcaatctattccaacaccagttattggaggtatatcagttgccttgtttggtgtgatagcttctagcggtttgaaaatcttgattgaatccaaagttgatatggataataagaaaaacttattgattgctagtgttattttggtctctgggattggaggattgatgcttcaagtaaatggtcttcaaatttcaggtgtcgctttctcaacactccttggcatcatcttatatcaggtacttcctgaaaaatag

SEQ ID NO: 690 - protein, 419 aa, Streptococcus pyogenes
MKDVIYDVEEVPKAGMLVGLSFQHLFAMFGATVLVPILVGIDPSVALLSSGLGTLAHLSVTKFKIPAYMGSSFAYIAAMQLLMKTNGIGAVAQGAMTGGLVYLIVALIVKAIGNDWIDNILPPIVVGPIVMVIGLSLASTAVNDVMLKNGNYNLTYLVIGLVTLLSVIFFNIYGKGIVAIVPLLLGLLVGYVVALLVGVLTGQEIVDFTNVAQAKWFSIPSVEIPFLTYGVKFYPSAILTMAPIAFVTMTEHFGHIMVLNSLTKRDYFKDPGLEKTLTGDGFAQIIAGFLGAPPVTSYGENIGVMALNKIFSVYVIAGAAVIAALLSFIGKVSALIQSIPTPVIGGISVALFGVIASSGLKILIESKVDMDNKKNLLIASVILVSGIGGLMLQVNGLQISGVAFSTLLGIILYQVLPEK

SEQ ID NO: 691 - DNA, 1953 bp, Streptococcus pyogenes
gtgttgactaagaaagaaattacaattaataattataatgacgatgctatccaagtcctagaagggttagatgctgttcgcaagcgtccagggatgtatatcggttcaacagatgctacgggattgcaccacctgatttgggaaattgttgataatgctgtcgatgaggccttgtctggttttggagatgatattaaggttgttatcaataaagatggctcggtcagtgtggcagatagcggacgtggaatgccaacaggccagcatgccatggggattcccaccgttcaagttatttttacgattcttcatgcaggtggtaaatttggtcagggtggctacaaaacgtcaggtggtttgcacggtgttggctcctctgttgtcaatgctttgtctgcctggttagaagtcgaaatcacaagagacgggtcagtgtatcgtcagcgctttgaaaatggtgggaaacctgttacaacccttaaaaaagttggcacagctcctaagtctaaatcaggaacggttgtaacctttatgcctgatgataagattttttcaactattgactttaagttcaataccatttcagaacgattgaaagaatctgcttttcttttgaaaaatgtcaagatgagcttgacagatcttcgtggagatgacccgattattgaagagtttcattatgaaaatggggttcaagatttcgtcgaatacctcaatgaagataaggaaaccttgacacctgttatttacatggaaggtcaagaccaagactttcaagtcgaggttgctttgcagtataacgatggtttctccgacaatatcttatcctttgtaaacaatgtgcgcaccaaagatggtggaagccatgaaacgggactaaagtcagctattaccaaagcgatgaatgactatgctcgtaaaaccaatctcttaaaagaaaaggataaaaatctagagggctcagattatcgagaaggactctcagcagtattatctatcttagttcctgagcagcacttgcaatttgaaggacagaccaaagacaaattgggaagtcccttagctagacctattgtagagagcattgtttctgaaaaattaaccttctttttactcgaaaatggagaagtagcttctcatctagttcgcaaagccattaaagctagagatgctcgcgaagctgctcgaaaagcgcgtgatgactcacgtaatggtaagaaaaacaaaaaagacaaaggcttgttgtcgggaaaactaaccccagctcagtccaaaaatgccaagaaaaatgaattgtatctggtcgaaggagattctgcgggaggttcagccaaacaaggacgagaccgcaaatttcaggctattttaccattacgtggcaaagttttaaataccgaaaaagctaagatggctgacatcttgaaaaatgaagaaattaacactatggtttataccattggagctggagtgggagctgactttaacctcgaggatatcaactatgataagattattatcatgaccgatgctgataccgatggggctcatattcagactcttttgctgactttcttttaccgttatatgcgaccgttggtggaagcaggtcacgtttatattgcgcttcccccgctttacaaaatgtcaaaaggtaaaggcaaaactgaaaaaattgcttatgcttggactgatggtgaattggaagatctgcgcagagaatttggcaagggggctattcttcaacgctataaaggactgggtgaaatgaatgctaaccaattatgggaaaccactatggaccctgaaaccagaacccttattcgtgttactattgacgacttggcaagagcagagcgacgtgtttctgtgttgatgggtgacaaagcagccccacgccgtcagtggatcgaggataacgtcaagtttaccttagaagaaaatacggtgttttag

SEQ ID NO: 692 - protein, 650 aa, Streptococcus pyogenes
MLTKKEITINNYNDDAIQVLEGLDAVRKRPGMYIGSTDATGLHHLIWEIVDNAVDEALSGFGDDIKVVINKDGSVSVADSGRGMPTGQHAMGIPTVQVIFTILHAGGKFGQGGYKTSGGLHGVGSSVVNALSAWLEVEITRDGSVYRQRFENGGKPVTTLKKVGTAPKSKSGTVVTFMPDDKIFSTIDFKFNTISERLKESAFLLKNVKMSLTDLRGDDPIIEEFHYENGVQDFVEYLNEDKETLTPVIYMEGQDQDFQVEVALQYNDGFSDNILSFVNNVRTKDGGSHETGLKSAITKAMNDYARKTNLLKEKDKNLEGSDYREGLSAVLSILVPEQHLQFEGQTKDKLGSPLARPIVESIVSEKLTFFLLENGEVASHLVRKAIKARDAREAARKARDDSRNGKKNKKDKGLLSGKLTPAQSKNAKKNELYLVEGDSAGGSAKQGRDRKFQAILPLRGKVLNTEKAKMADILKNEEINTMVYTIGAGVGADFNLEDINYDKIIIMTDADTDGAHIQTLLLTFFYRYMRPLVEAGHVYIALPPLYKMSKGKGKTEKIAYAWTDGELEDLRREFGKGAILQRYKGLGEMNANQLWETTMDPETRTLIRVTIDDLARAERRVSVLMGDKAAPRRQWIEDNVKFTLEENTVF

SEQ ID NO: 693 - DNA, 1407 bp, Streptococcus pyogenes
ttgattcagtttggaggttttagcatgcagcagcaagtcgcaataacagaaacagttttacgggacggtcatcaaagtttgatggcaacgcgtttatctattgaagatatgcttcctgtccttaccatcttagacaagattggttattattccctagagtgttggggaggagcaacctttgatgcctgtattcgttttttgaacgaagacccttgggaaaggctgcgcacgttaaaaaaaggcttacctaatacccgtttacaaatgttattaagaggccaaaaccttttaggctaccgtcattatgcagatgacatcgttgacaaattcattagtttatcagctcaaaatgggattgatgttttccgcatttttgatgccctaaatgacccacgaaatatccagcaagccttaagagctgtgaaaaagacgggtaaagaggctcaactgtgtattgcctatacaactagcccagtgcacacgcttaactattacctttctttagtgaaagaattggttgagatgggagctgattctatctgcatcaaagatatggctggtattctaactcccaaagcggctaaagagttggtatctggtatcaaagccatgactaacttacctcttattgtgcatacccatgcaactagtggcatttctcagatgacctatctagcagcagtagaagctggtgctgatagaattgatacggctttgtcaccttttagcgaaggaacttcacaacctgctacagaatccatgtatttagccttaaaagaagcaagttatgatatcacattagatgaaacgctactggaacaggctgctaatcaccttcgacaagcccgtcaaaagtacttagcagatggcattctggatcccagtcttctctttccagacccaaggacactacaataccaagttcctggaggcatgttgtctaatatgctatctcagctgaaacaagccaatgccgaatcaaaattagaagaagttttagcagaagttcctcgggtaagaaaagacttgggttatcctcccttagtaacaccgcttagccaaatggtcgggactcaagctgctatgaatgtgattttaggaaaaccttaccagatggtgtctaaggaaattaaacaatacttggcaggcgactatggcaaaacaccagcaccagtcaacgaagacttaaaacgaagtcaaattggctcagctcctgtcaccacaaatcgtcctgcagatcaactaagtcctgaattcgaggtgttaaaagcagaagtagcagatttagcccaaacggacgaagatgtgctgacttatgccctcttcccaagcgtagcaaaaccgtttttaacaaccaaataccaaactgatgacgtcattaaagtgactgcctttatcaaagcataa

SEQ ID NO: 694 - protein, 468 aa, Streptococcus pyogenes
MIQFGGFSMQQQVAITETVLRDGHQSLMATRLSIEDMLPVLTILDKIGYYSLECWGGATFDACIRFLNEDPWERLRTLKKGLPNTRLQMLLRGQNLLGYRHYADDIVDKFISLSAQNGIDVFRIFDALNDPRNIQQALRAVKKTGKEAQLCIAYTTSPVHTLNYYLSLVKELVEMGADSICIKDMAGILTPKAAKELVSGIKAMTNLPLIVHTHATSGISQMTYLAAVEAGADRIDTALSPFSEGTSQPATESMYLALKEASYDITLDETLLEQAANHLRQARQKYLADGILDPSLLFPDPRTLQYQVPGGMLSNMLSQLKQANAESKLEEVLAEVPRVRKDLGYPPLVTPLSQMVGTQAAMNVILGKPYQMVSKEIKQYLAGDYGKTPAPVNEDLKRSQIGSAPVTTNRPADQLSPEFEVLKAEVADLAQTDEDVLTYALFPSVAKPFLTTKYQTDDVIKVTAFIKA

SEQ ID NO: 695 - DNA, 1275 bp, Streptococcus pyogenes
ttgaaaaaattaaatgttattcttgttggtttattaagcattctgatgttgagtttagctattgtgtttattaatcgttggaaactaaacgaagatagtcagcgtatagttttggctgaaaagaaaaaaaacacgtcagatttagtgatcaaagctgtaaaacatattaaaaaagatcaaaaagactattattatttttccccgataaaacaagcagatgatttttttgtagataatttacctgtttcattatacaaaaaaaagaattcagataaagaattgattttagtaaggcctaaactgcaatcttctcacctaagatcagttaacactttgactatttctaaaatagtttatcagaaaaaattttttcatttggctaaaaaatcagaaaaagttataagtacatatcacgttacagacgacttgaaaccgtttcaggtaaaggatctagtatcaggacatttagaaagaatacaagaagaagttgaaaaaaaatatccagatgctggttttaatagcgataagtataatggcttaaaagaatctaattctttattaagcgatggctttgaggtaaaatcgggaaaccttatttttgataaaaagctaacgatacctttgacgacattatttgatgttattaatccagattttttagcaaatagcgatagagctgcgtatgataattataggacctacaaagaacagcatcccaaaaaactagttgcattaacgtttgatgatggtccagatccgacgacgactcctcaagttttagatattttggcaaaataccaggctaagggaactttctttatgataggttcaaaggttgtgaataatgaaaaccttactaaacgtgttagcgacgctggccatgaaattgctaatcatacttgggatcatcctaatctgactaatctttcagtcagcgagattcaacatcaagttaatatgacgaaccaggctattgaaaaagcttgtggcaagaaacctcgctatttacgccctccatacggagctacaaatgcaactgttcagcaatcctcaggattaacacaaatgctttggacggttgatacaagagattgggaaaatcatagcactgatggcattatgactaatgtcaaaaaccaattgcaaccgggaggagttgttttaatgcatgatattcatcaaacaactatcaatgctttgccgacagttatggaatatctaaaagcagaaggatacgaatgtgtgactgtatcagaactctatgcgcatcagtaa

SEQ ID NO: 696 - protein, 424 aa, Streptococcus pyogenes
MKKLNVILVGLLSILMLSLAIVFINRWKLNEDSQRIVLAEKKKNTSDLVIKAVKHIKKDQKDYYYFSPIKQADDFFVDNLPVSLYKKKNSDKELILVRPKLQSSHLRSVNTLTISKIVYQKKFFHLAKKSEKVISTYHVTDDLKPFQVKDLVSGHLERIQEEVEKKYPDAGFNSDKYNGLKESNSLLSDGFEVKSGNLIFDKKLTIPLTTLFDVINPDFLANSDRAAYDNYRTYKEQHPKKLVALTFDDGPDPTTTPQVLDILAKYQAKGTFFMIGSKVVNNENLTKRVSDAGHEIANHTWDHPNLTNLSVSEIQHQVNMTNQAIEKACGKKPRYLRPPYGATNATVQQSSGLTQMLWTVDTRDWENHSTDGIMTNVKNQLQPGGVVLMHDIHQTTINALPTVMEYLKAEGYECVTVSELYAHQ

SEQ ID NO: 697 - DNA, 1428 bp, Streptococcus pyogenes
ttggcaaaacaatataaaaatttagtgaacggtgaatggaaactatcagaaaacgagattaccatttacgcaccagcaacaggtgaagagttaggatcagttccagcgatgacgcaggcagaggtagatgctgtttacgcttcagctaaaaaggctctatcagattggcgcgctttgtcttatgtggaacgtgcagcttaccttcataaagcggctgatattttagtacgtgatgctgaaaagatcggcgcgattctttcaaaagaagtagccaaaggtcacaaggcagctgtcagtgaagttattcgtaccgctgaaatcattaattatgcagcagaagaagggcttcgtatggaaggtgaagttcttgaaggtggtagcttcgaagctgcaagtaagaagaagattgctattgttcgtcgtgaaccagttggtttagttcttgccatctcaccttttaattatcccgttaacttggcaggttctaaaattgctccagctcttattgcaggaaatgttgttgctcttaaaccaccaacacaaggctctatttctggtttgttactagcagaagcttttgcagaagctggtattccagcaggtgtctttaataccattacagggcgaggttctgttatcggtgattatatcgttgagcacgaagcggttagctttatcaactttacaggttctactccaattggggaaggaatcggtaaattagcgggtatgcgaccaattatgcttgagcttggcggtaaggattctgctatcgttttggaagatgcagatcttgctttagcagcgaaaaatattgtagccggtgcttttggttactcaggccaacgttgtacagcggttaaacgtgttcttgtgatggacaaggtggcggatcaattggcggctgagattaaaacacttgttgaaaaactaagtgtcggaatgcctgaagacgatgctgatattacaccattaattgatacatcagctgctgattttgttgaagggttgattaaagatgcaactgataagggagctactgctttgacagcctttaatcgtgaaggcaatcttatttcacccgttctctttgatcatgtgacaactgacatgcgtttggcatgggaagagccgttcggcccagtattaccaattattcgtgtaaccactgtagaagaagccatcaagatttctaatgagtctgaatatggtttgcaagcttctatttttacaactaatttcccaaaagcttttggcattgctgagcaattagaagttggaactgttcaccttaacaataaaacacaacgtggaacagataatttcccattcttaggcgctaaaaaatcaggtgcaggggtacaaggagttaaatattctatcgaagctatgacaactgttaaatctgttgtatttgatatccagtaa

SEQ ID NO: 698 - protein, 475 aa, Streptococcus pyogenes
MAKQYKNLVNGEWKLSENEITIYAPATGEELGSVPAMTQAEVDAVYASAKKALSDWRALSYVERAAYLHKAADILVRDAEKIGAILSKEVAKGHKAAVSEVIRTAEIINYAAEEGLRMEGEVLEGGSFEAASKKKIAIVRREPVGLVLAISPFNYPVNLAGSKIAPALIAGNVVALKPPTQGSISGLLLAEAFAEAGIPAGVFNTITGRGSVIGDYIVEHEAVSFINFTGSTPIGEGIGKLAGMRPIMLELGGKDSAIVLEDADLALAAKNIVAGAFGYSGQRCTAVKRVLVMDKVADQLAAEIKTLVEKLSVGMPEDDADITPLIDTSAADFVEGLIKDATDKGATALTAFNREGNLISPVLFDHVTTDMRLAWEEPFGPVLPIIRVTTVEEAIKISNESEYGLQASIFTTNFPKAFGIAEQLEVGTVHLNNKTQRGTDNFPFLGAKKSGAGVQGVKYSIEAMTTVKSVVFDIQ

SEQ ID NO: 699 - DNA, 1620 bp, Streptococcus pyogenes
ttgaaatttacagaatttaacttatcacaagacatccaatcagctgttgttaccgctggttttgagaaagcatctcctatccaggaaatgacgattcctctcgcactagaagggaaggatgttattggtcaagcacaaacaggaactggtaaaacagcagcgtttggtctaccaaccttgaataagattcgtactaacgaaaatatcatccaagcattggtcattgcaccaacgcgtgaattggctgtacaaagtcaggaagaattgttccgttttggacgtgaaaaaggggttaaggttcgctctgtttacggtggatcaagtattgaaaaacaaatcaaagcccttaaatcaggtgcccacattgtcgtgggaacaccgggtcgcttgttagatttgattaagcgcaaggctcttattttagatcatgtggaaaccttaatccttgatgaagcagatgaaatgcttaacatgggattcttggaagacattgaagctattattagtcgtgtcccagcagaccgtcaaaccttgctcttctccgcaacgatgccggcacctattaaacaaatcggggttaaattcatgaaagaccctgaacatgttcaaattaagaacaaagaattaacaaacgtcaatgttgatcaatactatgttcgtgtgaaagaacaagaaaaatttgatactatgacccgtctgatggatgttaaccagccagaattatccatcgtttttgggcggactaagcgccgagttgatgaaattacacgtggcttgaaacttcgtggtttccgtgccgaaggaatccatggtgatcttgaccaaaataaacgcttacgtgttatccgtgatttcaaaaacgaccaaattgatattcttgttgccactgatgtagcagcgcgtggccttgatatttcaggagttacccacgtttataactacgatattacccaagatccagaaagttatgttcaccgtattggtcgtacaggtcgtgccggtaaatctggtgagtctatcacttttgtctcaccaaatgagatgggctacctctcaatgattgagaacttaacgaaaaaacagatgaaacctcttcgtccagcaactgctgaagaggcctttcaagccaagaaaaaagtagccctcaagaaaattgaacgcgactttgcggatgagactattcgttcaaactttgataaattcaaaggcgatgctgtccaattggctgccgaattcactcctgaagaattagctttatatattttgagcttaacggttcaagatccagatagcttaccggaagttgaaattgcacgtgaaaaaccattaccattcaaatatgtgggtggtggtcacggcaataaaaatggcaaaggtggtcgtggacgtgacaaccgtaaccgtggtgatcgccgtggcggctatcgtggtgaccgtaacagagatgagcgtgatggtgaccgtcgtcgtcaaaaacgtgataagcgtgatggtcacgatggcagtggcaaccgcgatttcaaacgtaaatcaaaacgtaatagtaaagactttttcaataaagagaaaaaatcaagtgctaaaaatactggttttgtgattcgtcacaaaggtgaataa

SEQ ID NO: 700 - protein, 539 aa, Streptococcus pyogenes
MKFTEFNLSQDIQSAVVTAGFEKASPIQEMTIPLALEGKDVIGQAQTGTGKTAAFGLPTLNKIRTNENIIQALVIAPTRELAVQSQEELFRFGREKGVKVRSVYGGSSIEKQIKALKSGAHIVVGTPGRLLDLIKRKALILDHVETLILDEADEMLNMGFLEDIEAIISRVPADRQTLLFSATMPAPIKQIGVKFMKDPEHVQIKNKELTNVNVDQYYVRVKEQEKFDTMTRLMDVNQPELSIVFGRTKRRVDEITRGLKLRGFRAEGIHGDLDQNKRLRVIRDFKNDQIDILVATDVAARGLDISGVTHVYNYDITQDPESYVHRIGRTGRAGKSGESITFVSPNEMGYLSMIENLTKKQMKPLRPATAEEAFQAKKKVALKKIERDFADETIRSNFDKFKGDAVQLAAEFTPEELALYILSLTVQDPDSLPEVEIAREKPLPFKYVGGGHGNKNGKGGRGRDNRNRGDRRGGYRGDRNRDERDGDRRRQKRDKRDGHDGSGNRDFKRKSKRNSKDFFNKEKKSSAKNTGFVIRHKGE

SEQ ID NO: 701 - DNA, 1959 bp, Streptococcus pyogenes
ttgatatcgattaaagatgataatacccctcttgtagcagcctttgaagatgagattacacaggaggccaatagtgattacaaactaaattttaagtatcctgctaaacacgagtatcgccctttaataaaaaaaggaataatcttagaagctgatgatctgcatggttctcagctttttaggatttttgaaattactaagcggcatggctatattaacgtttacgctaatcaggtcgctgatgacttaaatggctatgcaattgacactatcagtgttgatagggtgcaaggcatgacagtaatgtcagagttagcaggtagtatcaagcgtgagcatccttttagcttttttagtgatattgacggtcgtcacacatttaatcaatcagacgtatctgttatggacgctttagctaatggcaagcactcaatcatggggcagtggggtggcgaacttgtacgaaataaataccaaattaacttgctcaaaaaagctggcaaagataccgaaaccttgttcatgtacaagaaaaacctcaaatcttatgaggaaacagatactatcaaagggcttgtctctatccttcatttagttgctgaagtagaagaagaacatgaagtagaaaccagagaagcttcagatggaaacattggtcatagtgaatcaccgaaaaagaaaacaattagggtatctgttgagagcaagctcaaagacactcatccgataattgttgaaaagactatcaaggtgcaggatcaagatgtcaaaacagaagaggacttgcttgcatatggtaagaaatactttgaaaaaactctttgcgacataccaggtaatagtttaaaaattgatgttactaataactacgagggcgctgttaggctatttgacacagcaattgtcttccacgagctctatgacagagacttacgaatgcaaatcactggctatcggttcgcccctatggctaatcggttaaaatccatcatctttggagagattaagaccaacttagcaaaacaaattagcaatcaaattgacaataaggtagctgaatcaactgctcaacatgacgcagcatttgaagcaaaattacaaaagcagattgataatgctaatcgtatttttgacacaaaagaagctaaactccgtgaagagattgaagatggcatcaaaaaagctgaagctaatgcagaggtcaaagttgctgaggttaacgctaaagtgctggaagctgaggagctagccaaggcagtcgatgagcgactcaaaaaatttttatctgatgctgacactaaagagcaagattttgataaaaaacttgaagaatttagaacgtctcttaaagaccttgaagttgatgaaaagcagattgatgatgctttggccaaagccggttttagcaaggatagcttagctgacattaaagctaaactggaagacacgtctgaaactgccacagttacagctaacattgttggatcaactggcggcacgttttacaatcgcaacagactggatggtgatactgacaaagttatcacttttgaacaaggttatattgacattgcccataatggtgaaggttttgaagaaggcaagacatacactatcagctttgaggcaacctgtgagctactgcgtaaagtaggaatcacagtgacacaggctaacatgaaaggtgctcgcttagtgttaacacctaaaaatcccaaattagttgtcgagagttttggcttgactaaggatactgagactatcaatgtctatccgtttagctacacagtgcttgtaaccagcgactggtataaatctaagcagatagatttaaacgcgtcggaggtgcaggaattggctctggagatggattataaagatgttgttgacggtaataatgccacaatcacagggcagtggtcagacagcccacaaattatattagacggaggtaattaa

SEQ ID NO: 702 - protein, 652 aa, Streptococcus pyogenes
MISIKDDNTPLVAAFEDEITQEANSDYKLNFKYPAKHEYRPLIKKGIILEADDLHGSQLFRIFEITKRHGYINVYANQVADDLNGYAIDTISVDRVQGMTVMSELAGSIKREHPFSFFSDIDGRHTFNQSDVSVMDALANGKHSIMGQWGGELVRNKYQINLLKKAGKDTETLFMYKKNLKSYEETDTIKGLVSILHLVAEVEEEHEVETREASDGNIGHSESPKKKTIRVSVESKLKDTHPIIVEKTIKVQDQDVKTEEDLLAYGKKYFEKTLCDIPGNSLKIDVTNNYEGAVRLFDTAIVFHELYDRDLRMQITGYRFAPMANRLKSIIFGEIKTNLAKQISNQIDNKVAESTAQHDAAFEAKLQKQIDNANRIFDTKEAKLREEIEDGIKKAEANAEVKVAEVNAKVLEAEELAKAVDERLKKFLSDADTKEQDFDKKLEEFRTSLKDLEVDEKQIDDALAKAGFSKDSLADIKAKLEDTSETATVTANIVGSTGGTFYNRNRLDGDTDKVITFEQGYIDIAHNGEGFEEGKTYTISFEATCELLRKVGITVTQANMKGARLVLTPKNPKLVVESFGLTKDTETINVYPFSYTVLVTSDWYKSKQIDLNASEVQELALEMDYKDVVDGNNATITGQWSDSPQIILDGGN

SEQ ID NO: 703 - DNA, 1323 bp, Streptococcus pyogenes
ttggcagataattggaaaaaaagtacgcgaggcaaagccctccttgtcattgaagctatttttgatcagggggcttacacaaacatagcgcttaatcagcaactaagcaataaagctttatctgctaaggacagagctctattaactgagattgtatatggtaccgtttcacgtaaaattagcttggaatggtatttagcccattatgtcaaagaccgagataaattggacaaatgggtttattatctccttatgctcagtctttatcaactgacttatttagataagttaccagcgcatgccattgttaacgatgcggttggtattgccaaaaatcgtggcaataaaaaaggtgcagagaagtttgtcaatgctattttacgtcaattcaccagccatcctctcccagatatggaaacaattaagcgtcgaaataagtattattcggtcaagtattcactgcctgtttggttggttaaaaagttagaagaccaatttggttctgacagatcagtggccatcatggaaagtttatttgtgcgtagtaaggctagtattcgcgtgacagaccctttgaagctagaggaagttgctgaggctttagatgcagaacgttcccttttatcagcaactggtttaaccaaagcgtcaggtcattttgcagccagtgattatttcacaaatggggacatcactattcaagatgaaagcagtcagcttgtagctcctactttaaacattgacggtgacgacataattcttgatgcgtgtagcgctccagggggcaagacctctcatatagcatcttacttaaaaacaggtaaagttattgccttagatctctatgatcataaactagagttggtgaaggaaaatgctaaccgcttaggagttgctgataacattgagacaagaaaactagatgccagagaggttcatcgtcattttgaaaaggatagctttgataagattttggtggatgctccttgctcaggaattggtttgattcgtcgaaaacccgatatcaaatataataaagaaagtcaaggtttcaatgctctgcaagctatccagctagagatattgtctagtgtttgtcaaaccttgcgtaaaggtggtataataacatacagtacttgcactatttttgatgaggagaatcgtcaagtcatcgaagcatttttacagagtcatcctaattttgaacaagtaaaactgaaccatacacaagcagatattgtcaaggatggttatcttattatcacaccagaacaataccagactgatggcttctttattggacaagtcagacgagtcttgtag

SEQ ID NO: 704 - protein, 440 aa, Streptococcus pyogenes
MADNWKKSTRGKALLVIEAIFDQGAYTNIALNQQLSNKALSAKDRALLTEIVYGTVSRKISLEWYLAHYVKDRDKLDKWVYYLLMLSLYQLTYLDKLPAHAIVNDAVGIAKNRGNKKGAEKFVNAILRQFTSHPLPDMETIKRRNKYYSVKYSLPVWLVKKLEDQFGSDRSVAIMESLFVRSKASIRVTDPLKLEEVAEALDAERSLLSATGLTKASGHFAASDYFTNGDITIQDESSQLVAPTLNIDGDDIILDACSAPGGKTSHIASYLKTGKVIALDLYDHKLELVKENANRLGVADNIETRKLDAREVHRHFEKDSFDKILVDAPCSGIGLIRRKPDIKYNKESQGFNALQAIQLEILSSVCQTLRKGGIITYSTCTIFDEENRQVIEAFLQSHPNFEQVKLNHTQADIVKDGYLIITPEQYQTDGFFIGQVRRVL

SEQ ID NO: 705 - DNA, 1470 bp, Streptococcus pyogenes
gtgtcagaagaaagcaaagaagtcgaagtaacaaaagaatcgcaaacattggggcttaatgaagccaagtcaatgacaattggtgaagctgtacgcaaacagtcagagataaaagcaggtgttactaaggatgatagtattttagataagtacattaagcaacaccgtgacgaagtttcttctcaaaagtttgatgctaagtatacagagcttgatacagctagtttagataactttatcaaaaaacaaagagaagcattgagtaaagccggtcttgttgatgacgaacctgtgtctgcggagtctgctgagcaagatagcactttggttgaagaagtagctgaagacttagctccaatggagactactgcggtggtaactgggattccggtggaagcgacagtccctgtgttagatctagatccatcagagagggtcattccagaaccacagatgaccaaggaagaaccaaaaagagatcagtttctttctgaagatagccaccatccagccaaacaaaacacgaaaaaaggttggttaatagctttatttctgctattattggccattcttgcagttgtatttggttggaaccatttcttgagacaagacagtggtaaaacaactcaaacagcaagtaaacagacaaagacctctttgcagaccgacagtgctaaaaaagcaacgcgcttgaaggctgctgctaaagctttcgaaaaactatatggtactttttatacagatgccacaaagagcaaattaaaaaatagtgcctttgctactttgccagatttagaagctgccttgaaagctttggaaggctctgcttactatgataaggcgaaagcaaaagtcgattcccttaagaaagctattgctgctattacagcggttaacggtaaatttgtttccgatgttgttgtagatggtgaaaaggtttcggctgaagtcaaggctgatgctaattttgatgatttatcaagtgcaaccttgacaataggaaatgcaaatcttgatgctgtcttgcaggcaagcatcacagaaggtcgtcagcaactagccagcaaggctgaggccgctaaagcagctaatgagcaagcagtccaggatcaagcagctcaaggacaaagtacatcagtagcaccatctggctatggcttgacaagttatgatcctgcaagcttacaacggcatttatcacgtgtaccttacaatcaagatgttattgctgacagagctaacccatcttgggcatttaatccaggagttcttgaaaaaattgtagcaacctcacaagctagaggttatatttcaggcaaccaatatattttagagccggttaatattattaatggcaatggttactataatatgtttaagcctgatggcacttatctgttctctattaattgtaagacgggttattttgtaggaaatggcaaaggttatgctgatgctttagattactga

SEQ ID NO: 706 - protein, 489 aa, Streptococcus pyogenes
MSEESKEVEVTKESQTLGLNEAKSMTIGEAVRKQSEIKAGVTKDDSILDKYIKQHRDEVSSQKFDAKYTELDTASLDNFIKKQREALSKAGLVDDEPVSAESAEQDSTLVEEVAEDLAPMETTAVVTGIPVEATVPVLDLDPSERVIPEPQMTKEEPKRDQFLSEDSHHPAKQNTKKGWLIALFLLLLAILAVVFGWNHFLRQDSGKTTQTASKQTKTSLQTDSAKKATRLKAAAKAFEKLYGTFYTDATKSKLKNSAFATLPDLEAALKALEGSAYYDKAKAKVDSLKKAIAAITAVNGKFVSDVVVDGEKVSAEVKADANFDDLSSATLTIGNANLDAVLQASITEGRQQLASKAEAAKAANEQAVQDQAAQGQSTSVAPSGYGLTSYDPASLQRHLSRVPYNQDVIADRANPSWAFNPGVLEKIVATSQARGYISGNQYILEPVNIINGNGYYNMFKPDGTYLFSINCKTGYFVGNGKGYADALDY

SEQ ID NO: 707 - DNA, 1389 bp, Streptococcus pyogenes
ttgacagtaaaagcagtcttttttgatattgatgggacccttctcaatgatcgtaaaaatatccaaaaaacaacgcaaaaagccatccaacaactcaaaaaacaaggcattatggtcggtttagcaactggtcgtggaccgggatttgtacaaccttttctagaaaattttggattagattttgccgttacttacaatgggcaatatatcttaacaagagataaggtcttatatcagaatcaattgccaaagtcgatgatttacaaagtgattcgctatgccaacgaaaaaaagcgagaaatttctcttggaacagcttctggattagcaggatcgcgtattattgatatggggactagcccatttggacaagtcattagtagttttgtgcccaaaagttgggcaagaacagttgagggtagttttaagcatttgattcgccgaatcaagcctcagagttttagaaatttagtaactattatgcgggagcctatttatcaggttgttctggtagcgtcacaagctgaaactaagaaaatacaagagaagttccctcatataaaaattacaagaagtagtccttattccttggatctgatctctgttgatcaatcaaaaataaaaggaattgaacgtttgggagagatgtttggatttgacttgtctgaagtgatggcttttggagattcagataatgaccttgaaatgttatcaggagttggtatcggtattgctatgggaaatgctgaaactgtggtaaaagatggagcccatttcactaccgactctaataataatgatgggatttccaaagccttagctcactacggtctcatccattttgatatagagaagagctttaaaagccgtgatgaaaattttaataaagtcaaagattttcatcgtctgatggactcagatactattgaaacaccgcgtagttataccatttcagaagctggttataggtcaggctttaaagtagaagaaattgttgagtttctttacgcagcaagcaagggagaccaacaacaatttacacaggctattttcgatttgcatggtgctgttgaccaagcagctaataaggtacaagctaaaaaacatgttgaaacgcccctgattgggcaagttgatgccttagcggatttgctttattttacttatggttcttttgtactgatgggagtagatccacaacctatatttgaagcagtacatgaagcaaatatggctaaaatttttccagatggcaaggcacactttgaccccgttacccataaaattcaaaaacctgactattggcaagagcgtcacgcacctgaagtagccataaaaaaagagttagacaaacaattacaaaaatcactacaacgattcgataaatag

SEQ ID NO: 708 - protein, 462 aa, Streptococcus pyogenes
MTVKAVFFDIDGTLLNDRKNIQKTTQKAIQQLKKQGIMVGLATGRGPGFVQPFLENFGLDFAVTYNGQYILTRDKVLYQNQLPKSMIYKVIRYANEKKREISLGTASGLAGSRIIDMGTSPFGQVISSFVPKSWARTVEGSFKHLIRRIKPQSFRNLVTIMREPIYQVVLVASQAETKKIQEKFPHIKITRSSPYSLDLISVDQSKIKGIERLGEMFGFDLSEVMAFGDSDNDLEMLSGVGIGIAMGNAETVVKDGAHFTTDSNNNDGISKALAHYGLIHFDIEKSFKSRDENFNKVKDFHRLMDSDTIETPRSYTISEAGYRSGFKVEEIVEFLYAASKGDQQQFTQAIFDLHGAVDQAANKVQAKKHVETPLIGQVDALADLLYFTYGSFVLMGVDPQPIFEAVHEANMAKIFPDGKAHFDPVTHKIQKPDYWQERHAPEVAIKKELDKQLQKSLQRFDK

SEQ ID NO: 709 - DNA, 1665 bp, Streptococcus pyogenes
gtgtcaaatattacaacaagcttattccaagaaatggtccaagcggcagcgactcgccttggcaaacaagcagaatatgttaattccttaaatgtttttcctgttccagatggtgatacaggaacaaacatgagcatgactatggacaatggtgccaaggaagttgctgataaacctgcgtcaactgtgggagaagttggacaaatgttatcaaaaggtcttttgatgggagcgcgtggaaattctggagttattacttcacaactttttcgtggttttggtcaaagcattaagggaaaagatgagctgacaggtaaagatttggcacaagcctttcaagtgggtgtagaagttgcctacaaagcagtgatgaaacctgttgaaggaacaattttaactgtttctcggggtgcagcgactgctgccttaaaaaaagcagatcttacagacgacgccgtggaagtcatgcaagctgctttagacggtgccaaaggtgcccttgctaagacacctgatttattaccagtccttaaagaagttggtgtggttgattcaggcggtcaaggtcttgtctttatctatgaaggtttcctatctgctttgaatggcgactatgtgacttcagcagactttaaagcgactcctgctaacatgtctgaaatgattaatgctgagcatcacaaatccgttgttggtcatgtggctactgaagacattacctacggttattgtactgaaatcatggttgcccttaaacaaggcccaacctatgtgaaagaattcaactatgatgagtttcaaggctaccttagtggccttggtgactcgctgttagtggtcaatgatgatgagattgttaaagttcacgtccatactgaagaccccggacttgtgatgcaagaaggtcttaaatatggttcgctcatcaagattaaagtggacaatatgcgtaaccagcatgaagcacaggttcaaaagactgatgtcgaaaaaaacaaggctgaagtaaaagactttggcttgattgcagtagtagctggagaaggtttatctgaaattttcaaggcgcaaggtgttgattacgtgatttctggtggtcaaaccatgaatccatctacagaagatattgttaaagctattgaagcagttaatgccaaacaagtcattatcttgccaaacaataaaaatatctttatggctgcccaatctgctgcagaagtggtggatattccggctgctgttgttgcaacacgtactgttccgcaaggatttaccagcttgttggcctttgatccttcaaaatctttagaggacaatgtagcagatatgtcaactagtctttctgacgtggtcagtggaagcgttactttggcagtccgtgacaccaccattgatggtttagaaatccatgaaaatgatttcttgggaatggttgatggtaaaatcatcgtttcaaacccagacatggaagcaactctaaaagctgcctttgaaaagatgattgacgaagatagcgagattgtgactatctttgttggtgaagaaggtgatcaagacttagcagaagaacttgctgggtatttaggagagacttacgaagatgtggaagttgagatccatcaaggagatcagcctgtttacccatatctcatgagtgtagaataa

SEQ ID NO: 710 - protein, 554 aa, Streptococcus pyogenes
MSNITTSLFQEMVQAAATRLGKQAEYVNSLNVFPVPDGDTGTNMSMTMDNGAKEVADKPASTVGEVGQMLSKGLLMGARGNSGVITSQLFRGFGQSIKGKDELTGKDLAQAFQVGVEVAYKAVMKPVEGTILTVSRGAATAALKKADLTDDAVEVMQAALDGAKGALAKTPDLLPVLKEVGVVDSGGQGLVFIYEGFLSALNGDYVTSADFKATPANMSEMINAEHHKSVVGHVATEDITYGYCTEIMVALKQGPTYVKEFNYDEFQGYLSGLGDSLLVVNDDEIVKVHVHTEDPGLVMQEGLKYGSLIKIKVDNMRNQHEAQVQKTDVEKNKAEVKDFGLIAVVAGEGLSEIFKAQGVDYVISGGQTMNPSTEDIVKAIEAVNAKQVIILPNNKNIFMAAQSAAEVVDIPAAVVATRTVPQGFTSLLAFDPSKSLEDNVADMSTSLSDVVSGSVTLAVRDTTIDGLEIHENDFLGMVDGKIIVSNPDMEATLKAAFEKMIDEDSEIVTIFVGEEGDQDLAEELAGYLGETYEDVEVEIHQGDQPVYPYLMSVE

SEQ ID NO: 711 - DNA, 1389 bp, Streptococcus pyogenes
gtgagactaatcaaaaaaacctttttggtcatcaatggcttaattattgtagtggttacctctattttgttagtgctttattttgcaatgccaatttattacaccaaagtcaaagacaaagaagttaagtgtgaatttgaccaaacaagcaagcaaatcaaaggcaaaacggtaaccgagattagagatatcctaacaaaaaaaatcaacaaagataatatttggtacagcttagtagacagtgataaccaactgctctatccttccttgcagctcctagacggcgtcagtgaaagcaaagacagtcaaaatgttaatatcgtcaccacctttgacaactcttattctaatgttaaggtgatgagtcaaaaagtaaccctacgcgatggaaaaaaaatgacattgcttgggcaatcttcacttcaacccgtaacagatgctagcaaagttctccttgacctctacccgtcactattgattttttcagtgaccgtagggagtattgtcgcctacttatatagtaggacttctagccggcgtatccttagcatgtcacaaaccgccaaaaaaatggtcaacctagaaccaaacttaacgtgtaccattcacggcaaagatgaaatagcaatgttggctagtgatattaaccgtttgtatgcgagtctttcaacgagcatcaaatccttgcaaaaagagtatgaaaaagcttctgattcagaaagagagaaatctgagtttttacgcatgacatcgcacgagctaaagacaccaatcactagtgttatcggaatgattgatggaatgctctataatgttggtgactttgcagatcgtgacaaatatttgcgaaagtgccgagacgtccttgaagggcaagcccaactggttcaatccattttatctttatctaagattgaaaccctagcttctcaaaatcaagaactgttttcactaaaaagcagcctagaagaagaaatggaagtctttctcgtcttatcagaactaaaacacctcaaagtgactatcaatctcgaagaacaattcgtcaaagccaataaagtatatctactaaaggcgattaaaaatattattgacaatgcctttcactataccaaatcaggcggccaagtgatgattcaactaaaagacaaccaactagtgattaaaaatgaagcagagacattattgacacaacagcagatgaaacagttattccaaccgttttatcgaccagattatagtcgtaacaggaaagacggtggtacaggattggggctgtttatcacccaccagattcttgatcagcatcatctggcttatcgctttgttgttcttgatcaaagatggatggtatttacgattgattttccatcccatcatgacgattga

SEQ ID NO: 712 - protein, 462 aa, Streptococcus pyogenes
MRLIKKTFLVINGLIIVVVTSILLVLYFAMPIYYTKVKDKEVKCEFDQTSKQIKGKTVTEIRDILTKKINKDNIWYSLVDSDNQLLYPSLQLLDGVSESKDSQNVNIVTTFDNSYSNVKVMSQKVTLRDGKKMTLLGQSSLQPVTDASKVLLDLYPSLLIFSVTVGSIVAYLYSRTSSRRILSMSQTAKKMVNLEPNLTCTIHGKDEIAMLASDINRLYASLSTSIKSLQKEYEKASDSEREKSEFLRMTSHELKTPITSVIGMIDGMLYNVGDFADRDKYLRKCRDVLEGQAQLVQSILSLSKIETLASQNQELFSLKSSLEEEMEVFLVLSELKHLKVTINLEEQFVKANKVYLLKAIKNIIDNAFHYTKSGGQVMIQLKDNQLVIKNEAETLLTQQQMKQLFQPFYRPDYSRNRKDGGTGLGLFITHQILDQHHLAYRFVVLDQRWMVFTIDFPSHHDD

SEQ ID NO: 713 - DNA, 1725 bp, Streptococcus pyogenes
gtgaactatctaggtttcttcgaaaatccattagccatttatgatataatagtaaagaaaaacatagaaagttggggtctgttgatgaccaaaccatttcatcataagaaactaaaacaaataactataatagctgcaactagcctttttttattcctgatcggtggtgccttttactactctaaaaatcattgtattaatgcctatcttaaagctcgatcggcccaatcaggaccagtttttgagaatatcaaagcatatctagtctgggatgatactaatgagcagatcacaaatgacgaggcgatgtatactaagtttagaaggtatagtcagaaagaattgaggcaaaaaaagcaggatttaaaagccgctagtcaagatagtgccgttcaagtaaagtctgttggtcgtcgtttttggatttttcctgattatcggattgccataaaacccatggatttaacgataaaaacgaatgtgcctcaagcagacgttcttttaaatcaaaaaaaagttgctgtttctgattcagaacagttctcagtcaagcttgatcggctaccaacggcagaatataccgcaagtatcagaggcaaacacaacgggcgaaacattaaagtcaacaaatcatatgatggtgataatcccgtgctagatttgagtgtgtcttttagaacttttttggtaacaagcaatgctaagcaaggagatctttacttcgatgataaccatattggcacattaaaagatggtcaattacaagtagaagattaccctgttacagaaaacgcacaagcttatatgaaaacaacattcccagatggtgagttaagatcacaaaaatatgctctagctgatgttgaagaaggagcaaccctggagattttagttacagatcttttagaagaggacaaggcaggggagctattagtatcagcttttgatcagctgatgcactacctcagtacaggtcaagactcatctaacttacgtagcgtctttgaggcagggtctagcaacgcattttataggggattgaaagagtccataaaagcgaaatttcagacagatacaagaaaagccagccgtctcaatattccatctatccttttgacaacaatgactcaagtgggtaaaacaacttacgtgcttgatttcacagctacctacgaatttttgtatgacaagtcaacagatcctgagcagcatacctctggacatattaatcaagacttgactggaaaagtgactgtaaaaaaagttggacagcattaccttatcagccagtccggctccaaaaatattactgttgttaaagaggacaatcaactcaaagcgccatctgtctttcctgagtctattttgggaacgtggacaggccaagccaatggtttgagcatccatatgtctctagcatcagatggaacaattacgactaaagttgaagatcaaaaaggcaaccgttctaaagaaactcggacagctaaaattagtaaagttgaagacaaaggcaatggtttttatctttatacgccagatcctggaagtgacataagcgccttagttccagaaggaggattggggggtgcaaatgtcaaatatgcttatggtttcaaaatatctggtaaaacagcctctccagtggtgtggcaggcagcattaacacatgaatttgattataccaagccactttcgggagtaactttgcaaaagcaaccataa

SEQ ID NO: 714 - protein, 574 aa, Streptococcus pyogenes
MNYLGFFENPLAIYDIIVKKNIESWGLLMTKPFHHKKLKQITIIAATSLFLFLIGGAFYYSKNHCINAYLKARSAQSGPVFENIKAYLVWDDTNEQITNDEAMYTKFRRYSQKELRQKKQDLKAASQDSAVQVKSVGRRFWIFPDYRIAIKPMDLTIKTNVPQADVLLNQKKVAVSDSEQFSVKLDRLPTAEYTASIRGKHNGRNIKVNKSYDGDNPVLDLSVSFRTFLVTSNAKQGDLYFDDNHIGTLKDGQLQVEDYPVTENAQAYMKTTFPDGELRSQKYALADVEEGATLEILVTDLLEEDKAGELLVSAFDQLMHYLSTGQDSSNLRSVFEAGSSNAFYRGLKESIKAKFQTDTRKASRLNIPSILLTTMTQVGKTTYVLDFTATYEFLYDKSTDPEQHTSGHINQDLTGKVTVKKVGQHYLISQSGSKNITVVKEDNQLKAPSVFPESILGTWTGQANGLSIHMSLASDGTITTKVEDQKGNRSKETRTAKISKVEDKGNGFYLYTPDPGSDISALVPEGGLGGANVKYAYGFKISGKTASPVVWQAALTHEFDYTKPLSGVTLQKQP

SEQ ID NO: 715 - DNA, 1560 bp, Streptococcus pyogenes
gtgatcgagttaaacgatgaattcatccgaaaagagacgatagaactggccaacgatggcccacgagtacacaccactcaatatgaaactaaagtacctcggcttcataaatgctatctgcttttctttagcattattatcagttctttaacaattgcagtaccttttttaacagatgcagccaatggtcttcagtcccaaaacttatatataggaatgatgttaacgaaggggcaacttccctatagtgctgcttttacaacaggagggctcttttactttgttatcattgcattaagttattatttgggatcgacactttggctagtctttgttcaggtgttttgtttttacttatctggtttatatctttataaactcattaattatatgacaggctttcaaaaagtggctttaactttttcaattagctactatttattatctgttagtcttggttttgggggattgtatcctactcaactggctatgccatttatattaatatcggcttggtttttaactaagtattttgcctgtttagtgaaagatgaggcatttattctttttggctttgtaggtgctcttgcaatgctaattgacccgagtacccttatcttttggtcttttgcttgtgtgacagttttttcttataatataagccaaaagcatcttgcaagaggtttttatcaactgctagcttcgatttttggaatgattttagttttttacacagcaggatatttcattttgaacttacaagtgctaaatccttatttatcacaaacgatgatttatccttttactttttttaaatcaggaaacttatcgttgctttttggactggctattcagttgttcttcgctttggggcttggtcttttgacgggaatggagaatgtcattaggcgatttaaaaacaattctgatagggtcgtcaagtggctatttgtcatggtcattctagaatctatacttgtggctatattttcacaagactatcgcccctatcatcttttacctcttttaccttttggattaattttgactgctattcctgttggctatcagtatggtataggattaggtcagagtagtcatcgcagacgtcatggtaaaaatggtgttggtcgagtaatgatgatttatcttaagagacacttttatttgccaattttaattgtagggacaatactaatctgttctacttattgtttcattagtagtattcctcttaatcaggagcgtgatcatattgctagttatttagaacagaaactaaataaaactcaatctatttatgtttgggatgatacttctaaaatttatttggacagtaaagctaaatctgtttctcaatttagttctcctgacatcaatacgcaaaaagagagtcatcgaaaaatattagaagatgaactattagaaaataaggctgcttatatcgttgttaatcgctataaaaacctgcctaaaatcattcaaaaagtattatctactaattacaaagtagataaacagataacgacaaaaagttttattgtttatcagaaaaagtaa

SEQ ID NO: 716 - protein, 519 aa, Streptococcus pyogenes
MIELNDEFIRKETIELANDGPRVHTTQYETKVPRLHKCYLLFFSIIISSLTIAVPFLTDAANGLQSQNLYIGMMLTKGQLPYSAAFTTGGLFYFVIIALSYYLGSTLWLVFVQVFCFYLSGLYLYKLINYMTGFQKVALTFSISYYLLSVSLGFGGLYPTQLAMPFILISAWFLTKYFACLVKDEAFILFGFVGALAMLIDPSTLIFWSFACVTVFSYNISQKHLARGFYQLLASIFGMILVFYTAGYFILNLQVLNPYLSQTMIYPFTFFKSGNLSLLFGLAIQLFFALGLGLLTGMENVIRRFKNNSDRVVKWLFVMVILESILVAIFSQDYRPYHLLPLLPFGLILTAIPVGYQYGIGLGQSSHRRRHGKNGVGRVMMIYLKRHFYLPILIVGTILICSTYCFISSIPLNQERDHIASYLEQKLNKTQSIYVWDDTSKIYLDSKAKSVSQFSSPDINTQKESHRKILEDELLENKAAYIVVNRYKNLPKIIQKVLSTNYKVDKQITTKSFIVYQKK

SEQ ID NO: 717 - DNA, 1689 bp, Streptococcus pyogenes
ttgctaaagcagaatacagaaagagagggtagaaccatagagcaagaagatttgaaaaacttagaaaatgaaatcactgaagcgcgtgagaatgaagataaatatttcagcactttcaaaggtgttagaggtcagcttatcaaggaatgtcaagagatgaaagatgaagctttcaagattgcctatgatggcgttatggctgatagcaaacaccttgagaacgtaaaagcgggtagattgaccgaggtacaacatgaagaattagctaaagaaaaaggacaagaagccagtgaaaaagctttacctaaaacacctttgggcgtggctattatgctcaaacactatctccgctttattcgagttaaacctgaagctcaaggacaaaaagccccactttacttttttcatcctgatcacggggtttggctagaagataatgagtttttacaagatctcatttcagttattttcccaaacgcgactgaaaaacaagcttttgacacactttacaaaattgctaggcaaagtcaactgaaggagattcaaagagaatatacagttatcggaaatcagctctacaattataaaactggtcaatttgaagaattaactccagatataaccgtcactcgtaaaattaagacgggttacaataagaaagctaaagaacccacaataaagggctggaaacctactgcttggctcttagaattgtttgacggtgacgccgaactttataaccttgctattcagattattaaagctagcatcacaggtcaatccttacagaaaatcttctggttattcggtgaaggtgggacaggaaaagggacttttcagcaattactcattaatttagtgggtatggataacgtggcaagccttaaaataacagagctagcaaaaagtcgctttactacttcgatacttctagggaaatccattgtaattggtgatgatattcaaaaagacgcggttatcaaagatacgtctgatatatttagtttagccaccggtgacattatgacgattgaggacaaggggaaacgcccatatagtatccgtttaaacatgactgtggtacaatcttccaacggtttaccacggatgaacggtgataagtccgccattgatagacgctttaggattttaccttttaccaaagtatttaaaggaaagcccaacaaagctatcagaaatgattatattaatcgcaaagaagttcttgagtacttacttaagctagcgattgaaacaccaatcactgacattaatccaaaagcatctattgagatactggaagaacaccataaagagatgaacccagttattgacttcgtttctaagttcttcacggatgagctcaccagcgaatttattcctaatagctttgtctatcatgtttggaaaggctttttagaatactatgacatcaaacaaataaaatcagaaagagggttacataaagaaatcaaaagcaatcttcctgaagggtttgaagcaggccagaaggtcataccagtaggccgacagctccatacaggtttttatcctaaagaagatctacctctgtttgctagcgcatcttacgctaacggtagagcatcacccgaaaaaaggaaaaagccaaagaatgaacgtggatattacaatcattggccgacgcacaaaaaacaaaagaaaacttag

SEQ ID NO: 718 - protein, 562 aa, Streptococcus pyogenes
MLKQNTEREGRTIEQEDLKNLENEITEARENEDKYFSTFKGVRGQLIKECQEMKDEAFKIAYDGVMADSKHLENVKAGRLTEVQHEELAKEKGQEASEKALPKTPLGVAIMLKHYLRFIRVKPEAQGQKAPLYFFHPDHGVWLEDNEFLQDLISVIFPNATEKQAFDTLYKIARQSQLKEIQREYTVIGNQLYNYKTGQFEELTPDITVTRKIKTGYNKKAKEPTIKGWKPTAWLLELFDGDAELYNLAIQIIKASITGQSLQKIFWLFGEGGTGKGTFQQLLINLVGMDNVASLKITELAKSRFTTSILLGKSIVIGDDIQKDAVIKDTSDIFSLATGDIMTIEDKGKRPYSIRLNMTVVQSSNGLPRMNGDKSAIDRRFRILPFTKVFKGKPNKAIRNDYINRKEVLEYLLKLAIETPITDINPKASIEILEEHHKEMNPVIDFVSKFFTDELTSEFIPNSFVYHVWKGFLEYYDIKQIKSERGLHKEIKSNLPEGFEAGQKVIPVGRQLHTGFYPKEDLPLFASASYANGRASPEKRKKPKNERGYYNHWPTHKKQKKT

SEQ ID NO: 719 - DNA, 1620 bp, Streptococcus pyogenes
ttgcttacagtttctgatgtatcactacgctttagtgatcgaaaactatttgatgatgttaatatcaaattcacagccggcaatacttacggcttaatcggtgccaatggtgccggaaaatcaacttttcttaaaatccttgcaggagatattgaaccaagtactggtcatatctctttaggacctgacgaacgcttatctgttcttcgccaaaatcattttgattatgaagaagaacgtgcgattgatgttgtaatcatgggtaatgaacaactctacaatatcatgaaagaaaaagacgctatctatatgaaagcagatttttcagaagaagatggggttcgtgccgctgagctagaaggtatctttgctgaattaggtggctgggaggcagaaagtgaagcttctcaacttctccaaaatctaaatattccagaagaccttcactaccaaaatatgagtgaactggctaatggagataaagtgaaagtccttcttgctaaagcgctctttggtaagcctgacgttttattacttgacgagccaaccaatggtcttgatattcaatctatttcatggttggaagatttcttgattgattttgaaaatacagtcatcgttgtttcccatgaccgtcacttcttgaataaagtatgtactcacatggccgaccttgactttggtaaaatcaaactctttgtgggtaactacgatttctggaaacaatcttctgagctggccgctcgtttacaagctgaccgcaatgctaaagcagaagagaaaatcaaagaattacaagaattcgttgcccgtttctcagcaaacgcatctaaatcaaaacaagcaacctctcgtaaaaaaatgcttgataagattgaattagaagaaattgttccctcaagccgtaaatacccatttattaattttaaagcagagcgtgaaatgggaaatgacttcctcactgttgaaaatctttctgtaacgatcgatggagagaaaatcattgataatatcagtttcattttacgtccaggtgacaaagctgctattattggtcaaaatgatattcagacaactgctcttatgcgtgctttagcagatgatattgactacgaaggaaccattaaatggggagtgacaacaagtcgttcttacttgcctaaagacaattcaaaagattttgccacggaagaatctattcttgaatggttacgtcaatttgcctcaaaaggtgaagatgatgatacctttttacgtgggttcttaggacggatgcttttctctggagacgaagttaaaaaatctgttaacgttctttccggtggcgaaaaagtgcgtgtcatgctttctaagttgatgctattgaaatcaaacgttcttattcttgatgacccaactaatcacttagatttggaatctatttcaagtcttaatgatggaatcaaagacttcaaagaatctgttatctttgccagtcatgaccatgaatttattcaaacgattgctaaccacatcgttgttatttcaaaaaatggtgttatcgaccgtatagatgaaacttatgacgaattccttgacaatccagaagtccaagcccgagttgctgaactttggaaataa

SEQ ID NO: 720 - protein, 539 aa, Streptococcus pyogenes
MLTVSDVSLRFSDRKLFDDVNIKFTAGNTYGLIGANGAGKSTFLKILAGDIEPSTGHISLGPDERLSVLRQNHFDYEEERAIDVVIMGNEQLYNIMKEKDAIYMKADFSEEDGVRAAELEGIFAELGGWEAESEASQLLQNLNIPEDLHYQNMSELANGDKVKVLLAKALFGKPDVLLLDEPTNGLDIQSISWLEDFLIDFENTVIVVSHDRHFLNKVCTHMADLDFGKIKLFVGNYDFWKQSSELAARLQADRNAKAEEKIKELQEFVARFSANASKSKQATSRKKMLDKIELEEIVPSSRKYPFINFKAEREMGNDFLTVENLSVTIDGEKIIDNISFILRPGDKAAIIGQNDIQTTALMRALADDIDYEGTIKWGVTTSRSYLPKDNSKDFATEESILEWLRQFASKGEDDDTFLRGFLGRMLFSGDEVKKSVNVLSGGEKVRVMLSKLMLLKSNVLILDDPTNHLDLESISSLNDGIKDFKESVIFASHDHEFIQTIANHIVVISKNGVIDRIDETYDEFLDNPEVQARVAELWK

SEQ ID NO: 721 - DNA, 3633 bp, Streptococcus pyogenes
gtgatttcttttgccccatttttaagccccgaagctattaaacatttgcaagaaaacgaaaggtgcagagatcagtctcaaaaacgcacagctcaacaaattgaagcaatttatactagtggccaaaatatacttgtatcagcttctgctggttcaggaaaaacctttgtaatggtcgaacgcatacttgataaaattttgagaggtgtttcaattgatcggctttttatctcaacctttactgttaaagcagctacagaactgcgtgagcggattgaaaacaaattatactcacaaattgctcaaactacagattttcaaatgaaagtttatttaacagaacaattgcaatctctttgtcaagctgatattggtactatggatgcttttgcacagaaagtagtaagtcgctatggttatagcattggcatttcatcccaatttcgtatcatgcaggataaagcagaacaagatgttttaaagcaagaggtgtttagcaaactctttaatgagtttatgaatcaaaaagaggcaccggtgtttagggctcttgtgaaaaatttttctggtaactgtaaagacacttcagcttttagagagttagtttatacttgttattcttttagccaatcgacagaaaacccaaaaatatggttgcaagaaaattttctaagcgctgctaaaacttaccaaagacttgaagatatcccggatcatgatattgaactcttacttttggcaatgcaagacactgcaaatcagctaagagatgtgactgatatggaagattatgggcagctgactaaggcaggtagccgatctgctaaatacactaaacacttaacgatcatagaaaagttgtctgattgggtgcgtgattttaaatgtttgtatggaaaagccggattggatcggttgatcagagatgtgacaggccttataccatctgggaatgatgttacagtctcgaaggtaaaataccctgtttttaagaccttgcatcaaaaattaaaacaatttaggcatttagaaacaattttaatgtatcagaaagactgtttttccttattggaacagttacaagattttgtgcttgcgttttcagaagcttatttagctgtcaaaatacaagaaagtgcttttgaattttcagatattgcacactttgcaatcaaaattttagaggaaaatacggatattcgccaatcctatcagcaacactatcatgaggtgatggttgatgaatatcaagataacaatcatatgcaagagcgactcctgaccttactatcgaacggtcataatcgctttatggtaggagatatcaaacaatcgatctatcgatttcggcaagccgatcctcagatttttaatcaaaagtttagagactatcaaaaaaaacctgagcaggggaaagtgattttactcaaagaaaactttcgtagccaatcagaggtgttaaatgtcagcaatgctgtttttagtcacttaatggacgaatcagtaggagacgtcttatacgatgagcaacatcagttaatagcaggtagtcatgctcaaacagtcccctatctagaccgtcgtgctcagttattgctatataatagcgataaagatgatggcaacgccccttcagatagtgagggtatttcatttagtgaggttacaattgttgccaaagaaattattaagcttcacaatgataagggtgtcccttttgaagacattacgttactcgtttcttcaagaacaagaaatgatatcatttctcatacattcaatcaatatggtattcctatagcaacagatggtgggcagcaaaactatcttaaatctgttgaagtgatggttatgttagatacattacgcaccattaataacccaagaaatgattatgcccttgtggctttactgcgctcaccgatgtttgcctttgatgaggatgatttagcaagaatagcacttcaaaaagacaatgagctagataaagattgcctatatgacaagatacaaagggctgtgattggaagaggtgctcatcctgaattgattcacgataccttgcttggcaagttaaatgtttttttaaagacgttgaaaagctggcgtcgatacgctaagctagggtcgttgtatgacttgatttggaaaatttttaatgatcgtttttattttgattttgtagctagtcaagcaaaagcagaacaagcacaagctaatctatacgcattagctctacgtgctaatcagtttgaaaaatcgggctataaagggctataccgttttattaaaatgattgataaggtacttgagacgcaaaatgacttagctgatgtggaagtggctactcctaaacaagctgttaatttaatgaccattcacaagtctaaaggtttacaatttccgtatgtatttatccttaattgtgacaagcgcttctcaatgacagatattcataaatcatttattctgaatcggcagcacggtatcggtatcaagtaccttgcagatatcaaaggtttacttggtgaaacaacactcaattctgttaaagtaagcatggaaaccttaccttatcaattgaacaaacaagagttgcgcttagcaactttatcagaagaaatgcgcttactgtatgttgctatgacacgagctgaaaaaaaagtttattttattggtaaagctagtaagagcaaaagtcaagaaatcacagatcctaaaaagttaggcaaacttttgccgctggctttacgagaacagttattgacattccaagattggctattagcaatagcagatatattttcaactgaagatctttattttgatgttcgctttattgaagatagtgatttgacacaagagtcagtcggacgacttcaaacaccacagttattaaatccagatgatcttaaagataatcgtcaatcagaaacaattgcacgggctttagatatgttagaagcagtgtctcaattgaatgccaattatgaagcagctattcatttgccaacagttcgaacgcctagccaacttaaggcaacttacgagcctttattagaacccattggtgtagatattatagagaaatcttctcgatcgctatctgattttactttgccacatttttcaaaaaaagcaaaagttgaagcaagtcatattggatcagctcttcatcagttgatgcaggtgctccctttgtcaaaaccgataaatcaacaaacgcttttagacgctttaagaggaattgatagtaacgaagaggtaaaaacagctcttgatctcaaaaaaatagagtcgttcttttgtgatacaagcctaggccaattttttcagacttaccaaaaacacttgtatcgagaagcgccatttgctattttaaaacttgaccctatcagtcaagaagagtatgtcctacgtggtattatagatgcctactttttgtttgatgatcatattgtattagtggactataaaacagataaatacaagcagcccattgagttaaaaaagcgttaccaacaacagttggagttatatgcagaagctctcactcaaacgtataaacttcctgtgactaagcgctatcttgttttaatgggaggtggaaagccagaaattgtcgaagtttaa

SEQ ID NO: 722 - protein, 1210 aa, Streptococcus pyogenes
MISFAPFLSPEAIKHLQENERCRDQSQKRTAQQIEAIYTSGQNILVSASAGSGKTFVMVERILDKILRGVSIDRLFISTFTVKAATELRERIENKLYSQIAQTTDFQMKVYLTEQLQSLCQADIGTMDAFAQKVVSRYGYSIGISSQFRIMQDKAEQDVLKQEVFSKLFNEFMNQKEAPVFRALVKNFSGNCKDTSAFRELVYTCYSFSQSTENPKIWLQENFLSAAKTYQRLEDIPDHDIELLLLAMQDTANQLRDVTDMEDYGQLTKAGSRSAKYTKHLTIIEKLSDWVRDFKCLYGKAGLDRLIRDVTGLIPSGNDVTVSKVKYPVFKTLHQKLKQFRHLETILMYQKDCFSLLEQLQDFVLAFSEAYLAVKIQESAFEFSDIAHFAIKILEENTDIRQSYQQHYHEVMVDEYQDNNHMQERLLTLLSNGHNRFMVGDIKQSIYRFRQADPQIFNQKFRDYQKKPEQGKVILLKENFRSQSEVLNVSNAVFSHLMDESVGDVLYDEQHQLIAGSHAQTVPYLDRRAQLLLYNSDKDDGNAPSDSEGISFSEVTIVAKEIIKLHNDKGVPFEDITLLVSSRTRNDIISHTFNQYGIPIATDGGQQNYLKSVEVMVMLDTLRTINNPRNDYALVALLRSPMFAFDEDDLARIALQKDNELDKDCLYDKIQRAVIGRGAHPELIHDTLLGKLNVFLKTLKSWRRYAKLGSLYDLIWKIFNDRFYFDFVASQAKAEQAQANLYALALRANQFEKSGYKGLYRFIKMIDKVLETQNDLADVEVATPKQAVNLMTIHKSKGLQFPYVFILNCDKRFSMTDIHKSFILNRQHGIGIKYLADIKGLLGETTLNSVKVSMETLPYQLNKQELRLATLSEEMRLLYVAMTRAEKKVYFIGKASKSKSQEITDPKKLGKLLPLALREQLLTFQDWLLAIADIFSTEDLYFDVRFIEDSDLTQESVGRLQTPQLLNPDDLKDNRQSETIARALDMLEAVSQLNANYEAAIHLPTVRTPSQLKATYEPLLEPIGVDIIEKSSRSLSDFTLPHFSKKAKVEASHIGSALHQLMQVLPLSKPINQQTLLDALRGIDSNEEVKTALDLKKIESFFCDTSLGQFFQTYQKHLYREAPFAILKLDPISQEEYVLRGIIDAYFLFDDHIVLVDYKTDKYKQPIELKKRYQQQLELYAEALTQTYKLPVTKRYLVLMGGGKPEIVEV

SEQ ID NO: 723 - DNA, 3567 bp, Streptococcus pyogenes
ttggcaggacatgaagttcgatacggaaaacaccgtacacgtcgtagcttttcaagaatcaaagaagttcttgatttaccaaatttgattgaaattcaaactgactcattccaagatttcctcgattcaggtttgaaagaagtatttgaagatgtacttcctatttcaaactttacggatactatggaacttgaatttgttggttacgaatttaaagaacctaaatatacccttgaagaagctcgtatccacgatgcaagttattctgcaccaatctttgttaccttccgtttggtcaataaagaaactggtgagattaaaactcaagaagtcttctttggtgatttcccaatcatgacggaaatgggtacctttattatcaatggtggtgaacgtatcatcgtttctcagttggtgcgttctccaggtgtttatttcaacgataaagttgataaaaacggtaaagttggttacggatcaacagtgattcctaaccgtggggcttggttggaattagagactgactcaaaagacattgcctacactcgtattgaccgtacccgtaagattccattcacaaccttggttcgtgcccttggtttctcaggtgatgatgaaattgttgatatctttggtgaaagcgaccttgttcgtaataccattgaaaaagacattcacaaaaatccaagtgattctcgtacagacgaagcccttaaagaaatttacgagcgtcttcgtccaggtgagccaaaaactgcagatagctctcgtagtcttttgattgcgcgtttctttgatgcacgtcgttacgatttggctgcggttggtcgttacaaagtgaacaaaaaacttaatatcaagactcgtcttttgaaccaaatcattgctgaaaaccttgtggatgctgaaactggcgaaattttggtagaagctggaactgagatgactcgtagcgtcatcgaatccatcgaagaacaccttgacggtgatttgaacaagtttgtttacacaccaaatgattacgctgtggttactgaaccagttgtccttcaaaagttcaaggttgtgtcaccaattgatcctgatcgtgtagtaactattgttggtaatgccaatccagatgataaggttcgtgcattgacacctgctgatattttggcagaaatgtcttacttcttgaaccttgctgaaggtcttggaaaagttgacgatattgaccacttgggtaaccgtcgtatccgtgccgttggtgaattgcttgccaaccaattccgcatcggtcttgctcgtatggagcgtaacgtgcgtgagcgtatgtctgttcaagacaacgatgtgttaacaccacaacaaatcatcaatatccgtcctgtcacagcagctgtcaaagaattcttcggttcgtctcagttgtcacagttcatggaccaacacaacccattgtcagagttgtctcacaaacgtcgtttatctgccttaggacctggtggtttgacacgtgaccgtgctggttatgaggttcgtgacgtgcattacacgcactatggccgtatgtgtccgattgaaacacctgaaggaccaaacattggtttgattaataacttgtcttcatttggacatcttaataaatatggtttcatccaaacaccttaccgtaaggttgaccgtgcgactggtacggtaactaacgagattgtttggttgactgccgacgaagaagacgaatacacagttgcacaggccaattcgaaactaaacgaagatggcacttttgctgaagaaatcgttatgggtcgtcaccaaggtaataaccaagaattttctgcaagtgttgttgatttcgttgacgtttcccctaaacaggtagttgctgttgcgacggcatgtattcctttcttggaaaacgatgactccaaccgtgccctcatgggtgccaacatgcaacgtcaggctgtgccattgattgatccaaaagcaccatatgttggtactggtatggaatatcaagctgcccatgactcaggcgctgcggtgattgctcagcaaaatggtaaagttgtcttttctgatgctgaaaaagtggaaatccgtcgtcaagatggctcgcttgatgtttaccacattaccaaattccgtcgttcaaactcaggaacagcctataaccaacgcacccttgttaaagtaggagacattgttgaaaaaggtgatttcatcgctgatggaccttctatggaaaatggtgaaatggctcttggacaaaacccagtcgttgcttacatgacttgggaaggttataactttgaggatgccgttatcatgagtgagcgccttgtgaaagaagatgtctacacatctgttcacttggaagaattcgaatctgaaacgcgtgatacaaaacttggccctgaagaaatcactcgggaaatcccaaatgttggtgaagaagccctcaaagaccttgacgaaatgggcattatccgtatcggtgctgaggttaaagaaggcgacatcttagtaggtaaagtcacacctaaaggtgaaaaagacctttctgctgaagaacgtttacttcacgccatctttggggataaatcgcgtgaagtgcgtgatacctcacttcgtgtccctcacggtggtgatggtatcgttcgtgatgtgaaaatctttacacgcgctaacggcgatgaattgcaatcaggtgttaatatgcttgtgcgtgtttacatcgctcaaaaacgtaaaatcaaggtcggagataaaatggccggtcgtcacggaaacaagggtgtcgtttcacgtattgtaccagttgaagacatgccataccttccagacggaacaccagttgacatcatgttgaaccctcttggggtgccatcacggatgaatattggtcaggttatggaacttcaccttggtatggctgctcgtaatcttggtattcacattgcaacacctgtctttgacggggcttcatcagaagacctttgggacactgttcgtgaagctggtatggatagcgatgctaagacggtcctttatgatggtcgcaccggtgaaccatttgacaaccgtgtatccgttggtgtcatgtatatgatcaaacttcaccacatggttgatgataaacttcatgcccgttctgtaggaccatactcacttgttacccaacagccacttggtggtaaagctcaatttggtggacaacgttttggtgagatggaggtttgggcccttgaagcttatggtgcatcaaatgttcttcaagaaatcttgacctacaagtcagatgacgtcacaggacgtttgaaagcctatgaagcgattactaaaggtaaaccaattccaaaaccaggtgtaccagaatccttccgtgttcttgtaaaagaattgcaatcgcttggtcttgatatgcgtgtgcttgacgaggatgataatgaagtggaacttcgtgatcttgatgaaggtgaagacgatgacattatgcatgttgacgatctcgagaaggcacgtgaaaaacaagctcaagaaactcaagaagtttctgaaacaactgacgaaaaataa

SEQ ID NO: 724 - protein, 1188 aa, Streptococcus pyogenes
MAGHEVRYGKHRTRRSFSRIKEVLDLPNLIEIQTDSFQDFLDSGLKEVFEDVLPISNFTDTMELEFVGYEFKEPKYTLEEARIHDASYSAPIFVTFRLVNKETGEIKTQEVFFGDFPIMTEMGTFIINGGERIIVSQLVRSPGVYFNDKVDKNGKVGYGSTVIPNRGAWLELETDSKDIAYTRIDRTRKIPFTTLVRALGFSGDDEIVDIFGESDLVRNTIEKDIHKNPSDSRTDEALKEIYERLRPGEPKTADSSRSLLIARFFDARRYDLAAVGRYKVNKKLNIKTRLLNQIIAENLVDAETGEILVEAGTEMTRSVIESIEEHLDGDLNKFVYTPNDYAVVTEPVVLQKFKVVSPIDPDRVVTIVGNANPDDKVRALTPADILAEMSYFLNLAEGLGKVDDIDHLGNRRIRAVGELLANQFRIGLARMERNVRERMSVQDNDVLTPQQIINIRPVTAAVKEFFGSSQLSQFMDQHNPLSELSHKRRLSALGPGGLTRDRAGYEVRDVHYTHYGRMCPIETPEGPNIGLINNLSSFGHLNKYGFIQTPYRKVDRATGTVTNEIVWLTADEEDEYTVAQANSKLNEDGTFAEEIVMGRHQGNNQEFSASVVDFVDVSPKQVVAVATACIPFLENDDSNRALMGANMQRQAVPLIDPKAPYVGTGMEYQAAHDSGAAVIAQQNGKVVFSDAEKVEIRRQDGSLDVYHITKFRRSNSGTAYNQRTLVKVGDIVEKGDFIADGPSMENGEMALGQNPVVAYMTWEGYNFEDAVIMSERLVKEDVYTSVHLEEFESETRDTKLGPEEITREIPNVGEEALKDLDEMGIIRIGAEVKEGDILVGKVTPKGEKDLSAEERLLHAIFGDKSREVRDTSLRVPHGGDGIVRDVKIFTRANGDELQSGVNMLVRVYIAQKRKIKVGDKMAGRHGNKGVVSRIVPVEDMPYLPDGTPVDIMLNPLGVPSRMNIGQVMELHLGMAARNLGIHIATPVFDGASSEDLWDTVREAGMDSDAKTVLYDGRTGEPFDNRVSVGVMYMIKLHHMVDDKLHARSVGPYSLVTQQPLGGKAQFGGQRFGEMEVWALEAYGASNVLQEILTYKSDDVTGRLKAYEAITKGKPIPKPGVPESFRVLVKELQSLGLDMRVLDEDDNEVELRDLDEGEDDDIMHVDDLEKAREKQAQETQEVSETTDEK

SEQ ID NO: 725 - DNA, 3642 bp, Streptococcus pyogenes
gtggttgacgtaaatcgttttaaaagtatgcaaatcacattagcctcaccaagtaaggtccgttcatggtcttatggtgaagttaaaaaacctgaaacaatcaactaccgtacattaaaaccagaacgtgaaggactctttgacgaagtcatctttggtccaacaaaagactgggaatgtgcgtgtggtaagtacaaacgtatccgttataaagggatcgtttgtgatcgctgtggggttgaggtaactcgtgctaaagtacgtcgtgaacgtatgggtcacattgagttaaaagctcctgtatcacatatctggtatttcaaagggattccatctcgtatgggattgactcttgatatgagtcctcgtgcccttgaagaagtgatctattttgcggcttatgtggtcattgatccaaaagatacaccgcttgaaccaaaatcattattaacagaacgtgaataccgtgaaaaactacaagagtatggtcatgggtcatttgtcgctaagatgggtgctgaagccattcaagatctcttgaaacgtgtggacttggcagctgaaatcgctgaattaaaagaagagttgaaatctgcttctggtcaaaaacggattaaagcagttcgtcgtttagacgtccttgatgcctttaacaaatctggaaataaaccagaatggatggttcttaacatcctgccggttattccaccagatcttcgtccgatggttcaattggatggtggtcgttttgcggcatcagacttgaatgacttgtaccgtcgtgtgattaaccgtaataaccgtttggcacgtttgttagaacttaatgcccctggcatcattgttcaaaatgaaaaacgaatgcttcaagaagccgttgatgctttgattgataatggtcgtcgtggtcgtccaatcactggaccaggaagtcgtccattgaaatcattgagccacatgcttaaaggtaaacaagggcgtttccgtcaaaacttgcttggtaaacgtgtagacttctctggacgttccgttatcgctgttggtccaacccttaaaatgtatcaatgtggtgtcccacgtgaaatggctatcgagctttttaaaccatttgtaatgcgcgaaattgttgccaaagaatatgctggtaacgttaaagccgctaaacgtatggttgaacgtggcgacgaacgcatctgggatatcttagaagaagttatcaaagaacacccagtcctacttaaccgcgcaccgactcttcacagacttggtattcaggcttttgaacccgttcttattgacggtaaggcacttcgtcttcacccacttgtgtgtgaggcctacaatgccgacttcgatggagaccaaatggccattcacgtgccactttcagaagaagcacaagctgaagctcgtcttttgatgcttgctgcagagcacatcttgaaccctaaagatggtaaaccagttgttactccatctcaggatatggttcttggtaactactatcttacgatggaagatgctggtcgcgaaggcgaaggtatgattttcaaggataaagacgaagctgtgatggcatatcgtaatggttatgctcatcttcatagtcgtgtgggtatcgctgttgacagcatgccaaacaaaccttggaaagacaatcaaagacataaaatcatggtgacaactgttggtaagattctctttaacgatatcatgccagaggaccttccttacctccaagagccaaacaatgccaacttgacagaaggaacacctgataaatacttccttgaacctggtcaagacatccaagaagtgattgatcgcttagacatcaatgtgccatttaagaagaaaaacctcggtaacatcattgcggaaaccttcaaacgtttccgtacaacagaaacatcagccttccttgaccgcttgaaagaccttggttactaccactcaacccttgctggtttgacagtgggtatcgctgacattcctgttattgataataaagctgaaatcattgatgctgctcaccatcgtgttgaagaaattaacaaagccttccgtcgtggtttgatgacagatgatgaccgttatgttgccgttacaacaacatggcgtgaagctaaagaagcccttgaaaaacgtctgattgaaacacaagatcctaagaacccaatcgttatgatgatggactcaggagctcgtggtaacatctcaaacttctcacagcttgctggtatgcgtggtttgatggctgctcctaacggacgcatcatggaacttcctatcttgtcaaacttccgtgaaggtttgagcgttttggaaatgttcttctcaacccacggtgcacgtaaagggatgaccgatacggcccttaaaacagccgactcaggttaccttactcgtcgtttggttgacgttgcccaagatgttatcattcgtgaggacgattgtggcactgatcgtggtcttcttatccgtgctattacagatggtaaagaagttaccgaaacgcttgaagagcgtcttcaaggtcgttacacacgtaaatcagtcaaacaccctgaaactggtgaagtcttgattggtgctgaccaattaatcactgaagacatggctcgtaagattgttgatgcaggtgttgaagaagtgaccattcgttctgtctttacctgtgcgactcgtcatggtgtctgccgtcactgttatggtatcaacttggcaactggtgatgctgttgaagtgggtgaagcagttggtactattgctgcccaatctatcggtgagcctggtactcagcttaccatgcgtaccttccacacgggtggtgtagcctcaaataccgatatcacccagggtcttcctcgtattcaagagatctttgaagcacgtaatcctaaaggggaagcggtcattactgaagtgaaagggaatgtcgtcgagattgaagaagatgcgtcaactcgtaccaagaaagtctacgttcaaggaaaaactggcatgggcgaatatgtcataccatttacagcacgtatgaaagttgaagttggcgacgaagttaatcgcggagctgcccttacagaagggtcaattcaaccgaaacgtctccttgaagtgcgtgataccttgtcagttgaaacgtaccttcttgcagaagtacaaaaagtttaccgtagccaaggggtagaaatcggagacaaacacgttgaggtaatggttcgccaaatgcttcgtaaagttcgtgtcatggatccaggtgatacagacctccttccaggtacacttatggatatttctgatttcacagatgctaacaaagatattgttatctctggtggtattcctgcgacatctcgtcctgttcttatgggtattactaaggcttcccttgaaaccaattccttcttatcagctgcatccttccaagaaacaactcgtgttcttacagatgctgctatccgtggtaaaaaagatcatcttcttggtcttaaagaaaatgttatcattggtaaaatcatcccagctggtactggtatggctcgttaccgtaacattgaaccacaagcgatgaatgagattgaagtgattgatcatacagaagtctcagcagaagccgtttttacagcagaagcagaataa

SEQ ID NO: 726 - protein, 1213 aa, Streptococcus pyogenes
MVDVNRFKSMQITLASPSKVRSWSYGEVKKPETINYRTLKPEREGLFDEVIFGPTKDWECACGKYKRIRYKGIVCDRCGVEVTRAKVRRERMGHIELKAPVSHIWYFKGIPSRMGLTLDMSPRALEEVIYFAAYVVIDPKDTPLEPKSLLTEREYREKLQEYGHGSFVAKMGAEAIQDLLKRVDLAAEIAELKEELKSASGQKRIKAVRRLDVLDAFNKSGNKPEWMVLNILPVIPPDLRPMVQLDGGRFAASDLNDLYRRVINRNNRLARLLELNAPGIIVQNEKRMLQEAVDALIDNGRRGRPITGPGSRPLKSLSHMLKGKQGRFRQNLLGKRVDFSGRSVIAVGPTLKMYQCGVPREMAIELFKPFVMREIVAKEYAGNVKAAKRMVERGDERIWDILEEVIKEHPVLLNRAPTLHRLGIQAFEPVLIDGKALRLHPLVCEAYNADFDGDQMAIHVPLSEEAQAEARLLMLAAEHILNPKDGKPVVTPSQDMVLGNYYLTMEDAGREGEGMIFKDKDEAVMAYRNGYAHLHSRVGIAVDSMPNKPWKDNQRHKIMVTTVGKILFNDIMPEDLPYLQEPNNANLTEGTPDKYFLEPGQDIQEVIDRLDINVPFKKKNLGNIIAETFKRFRTTETSAFLDRLKDLGYYHSTLAGLTVGIADIPVIDNKAEIIDAAHHRVEEINKAFRRGLMTDDDRYVAVTTTWREAKEALEKRLIETQDPKNPIVMMMDSGARGNISNFSQLAGMRGLMAAPNGRIMELPILSNFREGLSVLEMFFSTHGARKGMTDTALKTADSGYLTRRLVDVAQDVIIREDDCGTDRGLLIRAITDGKEVTETLEERLQGRYTRKSVKHPETGEVLIGADQLITEDMARKIVDAGVEEVTIRSVFTCATRHGVCRHCYGINLATGDAVEVGEAVGTIAAQSIGEPGTQLTMRTFHTGGVASNTDITQGLPRIQEIFEARNPKGEAVITEVKGNVVEIEEDASTRTKKVYVQGKTGMGEYVIPFTARMKVEVGDEVNRGAALTEGSIQPKRLLEVRDTLSVETYLLAEVQKVYRSQGVEIGDKHVEVMVRQMLRKVRVMDPGDTDLLPGTLMDISDFTDANKDIVISGGIPATSRPVLMGITKASLETNSFLSAASFQETTRVLTDAAIRGKKDHLLGLKENVIIGKIIPAGTGMARYRNIEPQAMNEIEVIDHTEVSAEAVFTAEAE

SEQ ID NO: 727 - DNA, 4944 bp, Streptococcus pyogenes
gtggagaaaaagcaacgtttttcccttagaaaatacaaatcaggaacgttttcggtcttaataggaagcgttttcttggtgatgacaacaacagtagcagcagatgagctaagcacaatgagcgaaccaacaatcacgaatcacgctcaacaacaagcgcaacatctcaccaatacagagttgagctcagctgaatcaaaatctcaagacacatcacaaatcactctcaagacaaatcgtgaaaaagagcaatcacaagatctagtctctgagccaaccacaactgagctagctgacacagatgcagcatcaatggctaatacaggttctgatgcgactcaaaaaagcgcttctttaccgccagtcaatacagatgttcacgattgggtaaaaaccaaaggagcttgggacaagggatacaaaggacaaggcaaggttgtcgcagttattgacacagggatcgatccggcccatcaaagcatgcgcatcagtgatgtatcaactgctaaagtaaaatcaaaagaagacatgctagcacgccaaaaagccgccggtattaattatgggagttggataaatgataaagttgtttttgcacataattatgtggaaaatagcgataatatcaaagaaaatcaattcgaggattttgatgaggactgggaaaactttgagtttgatgcagaggcagagccaaaagccatcaaaaaacacaagatctatcgtccccaatcaacccaggcaccgaaagaaactgttatcaaaacagaagaaacagatggttcacatgatattgactggacacaaacagacgatgacaccaaatacgagtcacacggtatgcatgtgacaggtattgtagccggtaatagcaaagaagccgctgctactggagaacgctttttaggaattgcaccagaggcccaagtcatgttcatgcgtgtttttgccaacgacatcatgggatcagctgaatcactctttatcaaagctatcgaagatgccgtggctttaggagcagatgtgatcaacctgagtcttggaaccgctaatggggcacagcttagtggcagcaagcctctaatggaagcaattgaaaaagctaaaaaagccggtgtatcagttgttgtagcagcaggaaatgagcgcgtctatggatctgaccatgatgatccattggcgacaaatccagactatggtttggtcggttctccctcaacaggtcgaacaccaacatcagtggcagctataaacagtaagtgggtgattcaacgtctaatgacggtcaaagaattagaaaaccgtgccgatttaaaccatggtaaagccatctattcagagtctgtcgactttaaagacataaaagatagcctaggttatgataaatcgcatcaatttgcttatgtcaaagagtcaactgatgcgggttataacgcacaagacgttaaaggtaaaattgctttaattgaacgtgatcccaataaaacctatgacgaaatgattgctttggctaagaaacatggagctctgggagtacttatttttaataacaagcctggtcaatcaaaccgctcaatgcgtctaacagctaatgggatggggataccatctgctttcatatcgcacgaatttggtaaggccatgtcccaattaaatggcaatggtacaggaagtttagagtttgacagtgtggtctcaaaagcaccgagtcaaaaaggcaatgaaatgaatcatttttcaaattggggcctaacttctgatggctatttaaaacctgacattactgcaccaggtggcgatatctattctacctataacgataaccactatggtagccaaacaggaacaagtatggcctctcctcagattgctggcgccagccttttggtcaaacaatacctagaaaagactcagccaaacttgccaaaagaaaaaattgctgatatcgttaagaacctattgatgagcaatgctcaaattcatgttaatccagagacaaaaacgaccacctcaccgcgtcagcaaggggcaggattacttaatattgacggagctgtcactagcggcctttatgtgacaggaaaagacaactatggcagtatatcattaggcaacatcacagatacgatgacgtttgatgtgactgttcacaacctaagcaataaagacaaaacattacgttatgacacagaattgctaacagatcatgtagacccacaaaagggccgcttcactttgacttctcactccttaaaaacgtaccaaggaggagaagttacagtcccagccaatggaaaagtgactgtaagggttaccatggatgtctcacagttcacaaaagagctaacaaaacagatgccaaatggttactatctagaaggttttgtccgctttagagatagtcaagatgaccaactaaatagagtaaacattccttttgttggttttaaagggcaatttgaaaacttagcagttgcagaagagtccatttacagattaaaatctcaaggcaaaactggtttttactttgatgaatcaggtccaaaagacgatatctatgtcggtaaacactttacaggacttgtcactcttggttcagagaccaatgtgtcaaccaaaacgatttctgacaatggtctacacacacttggcacctttaaaaatgcagatggcaaatttatcttagaaaaaaatgcccaaggaaaccctgtcttagccatttctccaaatggtgacaacaaccaagattttgcagccttcaaaggtgttttcttgagaaaatatcaaggcttaaaagcaagtgtctaccatgctagtgacaaggaacacaaaaatccactgtgggtcagcccagaaagctttaaaggagataaaaactttaatagtgacattagatttgcaaaatcaacgaccctgttaggcacagcattttctggaaaatcgttaacaggagctgaattaccagatgggcattatcattatgtggtgtcttattacccagatgtggtcggtgccaaacgtcaagaaatgacatttgacatgattttagaccgacaaaaaccggtactatcacaagcaacatttgatcctgaaacaaaccgattcaaaccagaacccctaaaagaccgtggattagctggtgttcgcaaagacagtgtcttttatctagaaagaaaagacaacaagccttatacagttacgataaacgatagctacaaatatgtctcagtagaagacaataaaacatttgtggagcgacaagctgatggcagctttatcttgccgcttgataaagcaaaattaggggatttctattacatggtcgaggattttgcagggaacgtggccatcgctaagttaggagatcacttaccacaaacattaggtaaaacaccaattaaacttaagcttacagacggtaattatcagaccaaagaaacgcttaaagataatcttgaaatgacacagtctgacacaggtctagtcacaaatcaagcccagctagcagtggtgcaccgcaatcagccgcaaagccagctaacaaagatgaatcaggatttctttatctcaccaaacgaagatgggaataaagactttgtggcctttaaaggcttgaaaaataacgtgtataatgacttaacggttaacgtatacgctaaagatgaccaccaaaaacaaacccctatctggtctagtcaagcaggcgctagtgtatccgctattgaaagtacagcctggtatggcataacagcccgaggaagcaaggtgatgccaggtgattatcagtatgttgtgacctatcgtgacgaacatggtaaagaacatcaaaagcagtacaccatatctgtgaatgacaaaaaaccaatgatcactcagggacgttttgataccattaatggcgttgaccactttactcctgacaagacaaaagcccttgactcatcaggcattgtccgcgaagaagtcttttacttggccaagaaaaatggccgtaaatttgatgtgacagaaggtaaagatggtatcacagttagtgacaataaggtgtatatccctaaaaatccagatggttcttacaccatttcaaaaagagatggtgtcacactgtcagattattactaccttgtcgaagatagagctggtaatgtgtcttttgctaccttgcgtgacctaaaagcggtcggaaaagacaaagcagtagtcaattttggattagacttaccggtccctgaagacaaacaaatagtgaactttacctaccttgtgcgggatgcagatggtaaaccgattgaaaacctagagtattataataactcaggtaacagtcttatcttgccatacggcaaatacacggtcgaattgttgacctatgacaccaatgcagccaaactagagtcagataaaatcgtttcctttaccttgtcagctgataacaacttccaacaagttacctttaagataacgatgttagcaacttctcaaataactgcccactttgatcatcttttgccagaaggcagtcgcgttagccttaaaacagctcaagatcagctaatcccgcttgaacagtccttgtatgtgcctaaagcttatggcaaaaccgttcaagaaggcacttacgaagttgttgtcagcctgcctaaaggctaccgtatcgaaggcaacacaaaggtgaataccctaccaaatgaagtgcacgaactatcattacgccttgtcaaagtaggagatgcctcagattcaactggtgatcataaggttatgtcaaaaaataattcacaggctttgacagcctctgccacaccaaccaagtcaacgacctcagcaacagcaaaagccctaccatcaacgggtgaaaaaatgggtctcaagttgcgcatagtaggtcttgtgttactcggacttacttgcgtctttagccgaaaaaaatcaaccaaagattga

SEQ ID NO: 728 - protein, 1647 aa, Streptococcus pyogenes
MEKKQRFSLRKYKSGTFSVLIGSVFLVMTTTVAADELSTMSEPTITNHAQQQAQHLTNTELSSAESKSQDTSQITLKTNREKEQSQDLVSEPTTTELADTDAASMANTGSDATQKSASLPPVNTDVHDWVKTKGAWDKGYKGQGKVVAVIDTGIDPAHQSMRISDVSTAKVKSKEDMLARQKAAGINYGSWINDKVVFAHNYVENSDNIKENQFEDFDEDWENFEFDAEAEPKAIKKHKIYRPQSTQAPKETVIKTEETDGSHDIDWTQTDDDTKYESHGMHVTGIVAGNSKEAAATGERFLGIAPEAQVMFMRVFANDIMGSAESLFIKAIEDAVALGADVINLSLGTANGAQLSGSKPLMEAIEKAKKAGVSVVVAAGNERVYGSDHDDPLATNPDYGLVGSPSTGRTPTSVAAINSKWVIQRLMTVKELENRADLNHGKAIYSESVDFKDIKDSLGYDKSHQFAYVKESTDAGYNAQDVKGKIALIERDPNKTYDEMIALAKKHGALGVLIFNNKPGQSNRSMRLTANGMGIPSAFISHEFGKAMSQLNGNGTGSLEFDSVVSKAPSQKGNEMNHFSNWGLTSDGYLKPDITAPGGDIYSTYNDNHYGSQTGTSMASPQIAGASLLVKQYLEKTQPNLPKEKIADIVKNLLMSNAQIHVNPETKTTTSPRQQGAGLLNIDGAVTSGLYVTGKDNYGSISLGNITDTMTFDVTVHNLSNKDKTLRYDTELLTDHVDPQKGRFTLTSHSLKTYQGGEVTVPANGKVTVRVTMDVSQFTKELTKQMPNGYYLEGFVRFRDSQDDQLNRVNIPFVGFKGQFENLAVAEESIYRLKSQGKTGFYFDESGPKDDIYVGKHFTGLVTLGSETNVSTKTISDNGLHTLGTFKNADGKFILEKNAQGNPVLAISPNGDNNQDFAAFKGVFLRKYQGLKASVYHASDKEHKNPLWVSPESFKGDKNFNSDIRFAKSTTLLGTAFSGKSLTGAELPDGHYHYVVSYYPDVVGAKRQEMTFDMILDRQKPVLSQATFDPETNRFKPEPLKDRGLAGVRKDSVFYLERKDNKPYTVTINDSYKYVSVEDNKTFVERQADGSFILPLDKAKLGDFYYMVEDFAGNVAIAKLGDHLPQTLGKTPIKLKLTDGNYQTKETLKDNLEMTQSDTGLVTNQAQLAVVHRNQPQSQLTKMNQDFFISPNEDGNKDFVAFKGLKNNVYNDLTVNVYAKDDHQKQTPIWSSQAGASVSAIESTAWYGITARGSKVMPGDYQYVVTYRDEHGKEHQKQYTISVNDKKPMITQGRFDTINGVDHFTPDKTKALDSSGIVREEVFYLAKKNGRKFDVTEGKDGITVSDNKVYIPKNPDGSYTISKRDGVTLSDYYYLVEDRAGNVSFATLRDLKAVGKDKAVVNFGLDLPVPEDKQIVNFTYLVRDADGKPIENLEYYNNSGNSLILPYGKYTVELLTYDTNAAKLESDKIVSFTLSADNNFQQVTFKITMLATSQITAHFDHLLPEGSRVSLKTAQDQLIPLEQSLYVPKAYGKTVQEGTYEVVVSLPKGYRIEGNTKVNTLPNEVHELSLRLVKVGDASDSTGDHKVMSKNNSQALTASATPTKSTTSATAKALPSTGEKMGLKLRIVGLVLLGLTCVFSRKKSTKD

SEQ ID NO: 729 - DNA, 2763 bp, Streptococcus pyogenes
ttgccacttaaaaagttagagagtagtaacaatcaagatatcattgctgaagaagttgctcttttgaaagaaatgttggaaaatatcacacgacggatgattggagatgatgcgtttacagttatcgagtctattatggtgttatctgaaaaacaagattacatagaattagaaaaagttgtcgccaatatttcaaatcaagaaatggaagtgatttccaggtatttttctattttacccttgctaatcaatatttcagaagatgtcgatttagcctatgaaatcaattatcaaaataatacggatactgattatttaggaaaattagccctaaccatcaaggatcttgctggaaaagataatggtaaagacattttggagcaggttaatgtggttcctgttttaacagcacatccgacgcaagtacaacgtaaaacgattctggaattgacaactcacattcataaacttctgcgcaaataccgtgatgctaaggctggtgtgattaatcttgagaaatggcgtcaggagctatatcgttatattgaaatgatcatgcagacagatattattcgcgagaaaaagcttcaggtgaaaaacgagataaaaaatgtcatgcagtattacgatggttctctcattcaagcagtgaccaagttgacaacagagtacaaaaacttagcccaaaaacacggtctagagttagacaatcccaaacccattaccatggggatgtggattggtggggaccgtgatgggaacccctttgtcacagctgaaaccttgtgcttgtcagctacggttcaaagtgaggttatcctcaattactacattgacgaattagcagccctttaccgaacattttcactgtcgtcaaccttggtacaacccaactcggaagtggaacgtttagccagtttgtctcaggaccaatcgatttaccgtggaaatgaaccttatcgcagagcttttcattatattcaatcgcgtcttaaacaaacacaaattcaactaactaatcagccagcagctagtatgagtagtagtgtgggactaaacacatctgcttggtcctcaccagctagtttagaaaatcccatcttagcctatgactctcctgttgattttaaagctgatttaaaggctattgagcagtcgctacttgataatggcaactccgctttgattgagggggatttgcgagaagtcatgcaagctgttgatatttttggcttcttcttagcaagcattgacatgaggcaagactccagtgtccaagaagcttgtgtggcagagttattaaaaggagccaatattgttgacgattatagctctctttcagaaactgaaaaatgcgatgttctcttacaacaattaatggaggagccaaggactttatcctcagcggcagttgctaaatcagacctattggaaaaagaactggctatctatactacggcacgagaattgaaagataagcttggagaagaggttattaaacaacatattatttcacatacagaaagtgtctctgatatgtttgagttggccatcatgcttaaagaagtgggattggttgaccagcagcgggctcgtgtgcaaattgttcccctctttgaaaccattgaggatttagataatgcccgtgacatcatggcagcctatttaagccatgacattgtcaaatcttggattgcaacgaatcgtaattaccaagaaatcatgttaggttattctgacagtaataaagatggtggctacttggcatcgggttggactctttataaagctcagaatgaattaacggctattggtgaggaacatggagtgaagatcaccttcttccatggtcgtggaggaacagttggtcgaggaggtggcccttcttatgatgccattacttcacaaccttttggttccatcaaagatcggattcgtctgacagagcaaggggaaattattgaaaacaaatacggcaataaagatgtggcttattaccatttagaaatgttgatttcagcttctatcaatcgtatggtgactcaaatgataacagatcctaatgagattgatagttttcgagaaatcatggatagcattgttgctgatagcaatatcatttatcgaaaattggtttttgacaatccccatttctatgattatttctttgaggcaagtccgattaaggaagtttccagtctcaacattgggtcaagaccagcggcccgtaaaacgattacggaaattacaggcttgcgtgccattccttgggtcttttcatggtcacaaaatcgcatcatgtttccaggttggtatggggtaggttcagcctttaaacgttatattgaccgagcacaaggtaaccttgaacgcctccaacatatgtatcagacgtggccttttttccattccttgttatcaaatgttgatatggtattatctaaatcaaacatgaatattgcctttcagtatgcacaactagctgaaaggcaggatgttcgagatgttttttatgagattttggatgagtggcaattgacaaaaaatgttattcttgctatccaagaccatgatgatctattggaggataatccttcccttaagcatagcttgaaatcacgcttgccgtattttaatgtgttgaactatattcaaattgaattgattaaacgttggcgtaataatcaacttgacgaaaatgatgaaaaattgatccatacaactatcaatggcatagcgactggtttacgtaattcaggctaa

SEQ ID NO: 730 - protein, 920 aa, Streptococcus pyogenes
MPLKKLESSNNQDIIAEEVALLKEMLENITRRMIGDDAFTVIESIMVLSEKQDYIELEKVVANISNQEMEVISRYFSILPLLINISEDVDLAYEINYQNNTDTDYLGKLALTIKDLAGKDNGKDILEQVNVVPVLTAHPTQVQRKTILELTTHIHKLLRKYRDAKAGVINLEKWRQELYRYIEMIMQTDIIREKKLQVKNEIKNVMQYYDGSLIQAVTKLTTEYKNLAQKHGLELDNPKPITMGMWIGGDRDGNPFVTAETLCLSATVQSEVILNYYIDELAALYRTFSLSSTLVQPNSEVERLASLSQDQSIYRGNEPYRRAFHYIQSRLKQTQIQLTNQPAASMSSSVGLNTSAWSSPASLENPILAYDSPVDFKADLKAIEQSLLDNGNSALIEGDLREVMQAVDIFGFFLASIDMRQDSSVQEACVAELLKGANIVDDYSSLSETEKCDVLLQQLMEEPRTLSSAAVAKSDLLEKELAIYTTARELKDKLGEEVIKQHIISHTESVSDMFELAIMLKEVGLVDQQRARVQIVPLFETIEDLDNARDIMAAYLSHDIVKSWIATNRNYQEIMLGYSDSNKDGGYLASGWTLYKAQNELTAIGEEHGVKITFFHGRGGTVGRGGGPSYDAITSQPFGSIKDRIRLTEQGEIIENKYGNKDVAYYHLEMLISASINRMVTQMITDPNEIDSFREIMDSIVADSNIIYRKLVFDNPHFYDYFFEASPIKEVSSLNIGSRPAARKTITEITGLRAIPWVFSWSQNRIMFPGWYGVGSAFKRYIDRAQGNLERLQHMYQTWPFFHSLLSNVDMVLSKSNMNIAFQYAQLAERQDVRDVFYEILDEWQLTKNVILAIQDHDDLLEDNPSLKHSLKSRLPYFNVLNYIQIELIKRWRNNQLDENDEKLIHTTINGIATGLRNSG

SEQ ID NO: 731 - DNA, 2682 bp, Streptococcus pyogenes
ttgtctaaagaacaaagacatgaagcattttacacgcaaagtgaagagaccgtactggctcaattagagaccagtcgcgaaggtcttacgtctgcccaagcaaaagagcgcttagcagagtatggtcgtaatgagcttgatgaaggcgaaaaacgaagtttatttatgaaattccttgatcaatttaaggatttgatgattattattttgattgtggcagcccttctttcagttcttacagaggggatggaaggtttgacagacgccattattatcttggctgttgttatcctaaatgctgcttttggtgtttaccaagaaggacaagctgaagctgctattgaagccttgaaatcaatgtcaagtccactggctcgtattcgccgcgatgggcatgtgactgagatagactctaaagaattggtccctggagatattgtcttgctagaagcgggagatgttgtccctgctgatctgcgtcttttggaagctaactccttaaaaatcgaagaagcagcgcttactggagaatctgtaccggttgaaaaagacttgtcaacggctgtttcagaagatgccggtattggtgatcgcgtcaatatgggatatcaaaactcaaatgtgacatatggtcgtgggattggggttatcactaacactggcatgtacaccgaggttgggcatattgctggtatgcttgctaatgctgatgagacagatacaccattgaagcaaaaccttgacaacctttctaagattttgacttatgcgatccttgtgattgcagcggtgacttttgctgttggagtcttcttgcgtggtcaacacccgcttgaaggcttgatgacttcagtagcgcttgctgttgcagctattccagagggacttcctgcgattgttactgttgtgctttctcttggaactcaagtacttgctaaacgtaacgccattatccgtaaattaccagctgttgaaacgctaggatcaactgaaatcattgcttctgataaaacgggtaccttgacaatgaatcaaatgaccgttgaaaaagtttataccaacgggacactccaaagttcatcagctgatattgcttttgacaatacgacacttcgtgtaatgaactttgctaatgatactaaagttgatccttcagggaagttaattggtgacccaacagaaacagctttggtagagtttgggttagaccacaattttgacgtacgtgaggctatggtggcagaacctcgtgtggcagaactgccatttgattctgaccgtaagttgatgtcaaccattcataaacaagctgatggcaaatatttcatcgctgttaaaggtgcaccagatcagttattgaaacgtgtcacacagattgaagaaaatggacaaattcgtcctattacggatgctgataaaaaaaccattcttgataccaataagagtcttgccaaacaagctcttcgtgtcttgatgatggcttacaaatattctgatgcccttccaacactggaaacagaaattgttgaggctaatcttgtcttctctggtttggtagggatgattgaccctgaacgtcctgaagcagcacaggctgttaaagtagctaaggaagctggcattcgtccaatcatgattactggtgaccaccaagatacagcaaaagctattgcgaaacgtcttggtattatcgaagaagatggcgttgatcatgtctttacaggtgctgaactcaacgaattatcagatgaagagttccaaaaagtctttaaacaatactccgtgtatgcccgtgtatctcctgagcataaagttcgtatcgttaaggcttggcaaaatgaaggcaaagttgttgccatgactggcgatggggttaacgatgcaccatctcttaaaacggcagatattggtattggtatgggaattacaggtacagaggtttctaagggagcttctgacatggttcttgccgatgataactttgcaaccattatcgttgcggttgaagaaggacgtaaggtcttctcaaacattcaaaaaacaattcaatacttactttctgctaacatggcagaagtctttaccatcttccttgcaaccttgtttggttgggatgtgcttcaaccagttcacttgctttggattaacttggtaactgataccctaccagctattgctcttggtgttgaacctgctgagcctggtgtgatgaaacacaaacctcgtggacgtaagtcaagcttctttgatggtggggtgaaggaagccattctttaccaaggtgccttccaaaccattttggtgcttggggtttatggttttgccttgatgttcccagaacacacaagctatcatgatgtccatgcagatgctttgaccatggcttatgtgaccctcggtttgattcagttggtacatgcctacaacgtgaaatctgtttaccaatccatctttactgttggattgttcaaaaacaaattgttcaactattctattccagtggcctttgtagcattaatggcaacagttgttgttcctggatttaatcaattctttcatgtgacacacttgacgatcacacaatggttagtggttattatcggaagtctcttgatggttgttcttgttgaattggtgaaagctgttcaacgatcacttggtcaagatgaaaaagcaatttaa

SEQ ID NO: 732 - protein, 893 aa, Streptococcus pyogenes
MSKEQRHEAFYTQSEETVLAQLETSREGLTSAQAKERLAEYGRNELDEGEKRSLFMKFLDQFKDLMIIILIVAALLSVLTEGMEGLTDAIIILAVVILNAAFGVYQEGQAEAAIEALKSMSSPLARIRRDGHVTEIDSKELVPGDIVLLEAGDVVPADLRLLEANSLKIEEAALTGESVPVEKDLSTAVSEDAGIGDRVNMGYQNSNVTYGRGIGVITNTGMYTEVGHIAGMLANADETDTPLKQNLDNLSKILTYAILVIAAVTFAVGVFLRGQHPLEGLMTSVALAVAAIPEGLPAIVTVVLSLGTQVLAKRNAIIRKLPAVETLGSTEIIASDKTGTLTMNQMTVEKVYTNGTLQSSSADIAFDNTTLRVMNFANDTKVDPSGKLIGDPTETALVEFGLDHNFDVREAMVAEPRVAELPFDSDRKLMSTIHKQADGKYFIAVKGAPDQLLKRVTQIEENGQIRPITDADKKTILDTNKSLAKQALRVLMMAYKYSDALPTLETEIVEANLVFSGLVGMIDPERPEAAQAVKVAKEAGIRPIMITGDHQDTAKAIAKRLGIIEEDGVDHVFTGAELNELSDEEFQKVFKQYSVYARVSPEHKVRIVKAWQNEGKVVAMTGDGVNDAPSLKTADIGIGMGITGTEVSKGASDMVLADDNFATIIVAVEEGRKVFSNIQKTIQYLLSANMAEVFTIFLATLFGWDVLQPVHLLWINLVTDTLPAIALGVEPAEPGVMKHKPRGRKSSFFDGGVKEAILYQGAFQTILVLGVYGFALMFPEHTSYHDVHADALTMAYVTLGLIQLVHAYNVKSVYQSIFTVGLFKNKLFNYSIPVAFVALMATVVVPGFNQFFHVTHLTITQWLVVIIGSLLMVVLVELVKAVQRSLGQDEKAI

SEQ ID NO: 733 - DNA, 2418 bp, Streptococcus pyogenes
gtgaatacttatttttgcacacaccataaacaattactactttattcaaacctattccttagctttgctatgatgggccaaggaactgccatttatgccgatacactgacttcaaattcagaacctaataatacttactttcaaacgcaaacgctcactactacagatagcgaaaaaaaggtagtacagccacaacaaaaagactactatactgaattgttagaccaatggaacagtattatcgcaggcaacgatgcttatgataaaaccaatcctgacatggtcacttttcataataaagctgaaaaggatgctcaaaacattattaaaagctatcaagggcctgaccacgaaaatagaacttacctttgggaacatgcaaaggattattccgcttctgctaatatcacgaaaacttaccgcaatattgaaaaaatagcaaaacagatcactaatcctgaatcatgctattatcaagatagtaaagctattgctattgtaaaagacggtatggccttcatgtatgaacacgcttataatctagatcgtgaaaatcatcaaacaactggaaaagaaaacaaagaaaattggtgggtttatgaaattggaactcctcgtgctattaataataccttatccttgatgtatccttattttactcaagaagaaattcttaaatacacagctccaatcgaaaaatttgtgcctgaccctactcgttttagggttcgcgctgccaatttttcaccttttgaagccaatagcggaaatttaattgatatggggcgtgttaaactcatttccggtattcttcgtaaagatgatctcgaaattagtgatacaatcaaagcaattgagaaagttttcacgctagttgatgaaggaaatggtttttaccaagacggttctttaattgatcacgtggttactaacgctcaaagtccactttataaaaaaggcattgcttacactggagcttacggtaatgtgcttatagatggcttatcgcaattaattcctattattcaaaaaacaaagtctcctataaaagcggataaaatggctactatctatcattggattaaccattcttttttccctatcatcgttcgtggagaaatgatggatatgactcgagggcgttctatcagtcgttttaatgcccaatctcatgttgctggcattgaagcacttcgtgctattttacgtattgctgacatgtctgaagagcctcaccgtttggcacttaaaacacgtataaaaacactcgtcacacaagggaatgctttttacaatgtctatgataatttgaaaacctatcacgatatcaaacttatgaaagaactactaagtgatacttctgttccagtccaaaaacttgatagttacgtagctagtttcaatagtatggataaattggcactatataataataaacacgattttgcttttggcctatcaatgttttcgaatcgaactcaaaattatgaagctatgaataatgaaaatcttcatggctggtttacttctgatggaatgttttacctatacaataacgatttaggacactacagtgaaaactattgggcaacggtaaatccctaccgcttacctggaaccacagaaactgagcaaaaaccactagagggaactcctgagaatattaaaacgaactatcaacaagttggcatgactggtctctctgatgacgcttttgttgcaagtaaaaaacttaataacacaagtgctctagctgctatgaccttcactaattggaataaaagcctcaccctcaataaagggtggtttatcttaggaaacaaaataatctttgttggtagcaatatcaaaaaccaatcatctcacaaggcgtatacaactattgaacaacgaaaagaaaatcaaaagtacccttactgttcttatgttaacaatcaacccgttgacttgaataatcagctagttgattttacaaacactaaaagtattttccttgaaagtgatgatcccgctcaaaatattggttactacttcttcaagccaacaacacttagcataagtaaggcacttcaaacagggaaatggcaaaacataaaagctgatgacaaatcaccagaagccatcaaagaagtttcaaatacctttatcactatcatgcaaaaccatactcaagatggcgatcgttatgcctatatgatgcttccaaatatgactcgtcaagaatttgaaacctatattagcaagcttgatatcgacttattagaaaacaatgacaaactggccgctgtctacgatcatgatagtcaacagatgcacgtcattcactatggaaaaaaagcaacgatgttttcaaatcataatctttctcatcaaggcttttatagttttcctcatcctgtcaggcaaaatcaacaataa

SEQ ID NO: 734 - protein, 805 aa, Streptococcus pyogenes
MNTYFCTHHKQLLLYSNLFLSFAMMGQGTAIYADTLTSNSEPNNTYFQTQTLTTTDSEKKVVQPQQKDYYTELLDQWNSIIAGNDAYDKTNPDMVTFHNKAEKDAQNIIKSYQGPDHENRTYLWEHAKDYSASANITKTYRNIEKIAKQITNPESCYYQDSKAIAIVKDGMAFMYEHAYNLDRENHQTTGKENKENWWVYEIGTPRAINNTLSLMYPYFTQEEILKYTAPIEKFVPDPTRFRVRAANFSPFEANSGNLIDMGRVKLISGILRKDDLEISDTIKAIEKVFTLVDEGNGFYQDGSLIDHVVTNAQSPLYKKGIAYTGAYGNVLIDGLSQLIPIIQKTKSPIKADKMATIYHWINHSFFPIIVRGEMMDMTRGRSISRFNAQSHVAGIEALRAILRIADMSEEPHRLALKTRIKTLVTQGNAFYNVYDNLKTYHDIKLMKELLSDTSVPVQKLDSYVASFNSMDKLALYNNKHDFAFGLSMFSNRTQNYEAMNNENLHGWFTSDGMFYLYNNDLGHYSENYWATVNPYRLPGTTETEQKPLEGTPENIKTNYQQVGMTGLSDDAFVASKKLNNTSALAAMTFTNWNKSLTLNKGWFILGNKIIFVGSNIKNQSSHKAYTTIEQRKENQKYPYCSYVNNQPVDLNNQLVDFTNTKSIFLESDDPAQNIGYYFFKPTTLSISKALQTGKWQNIKADDKSPEAIKEVSNTFITIMQNHTQDGDRYAYMMLPNMTRQEFETYISKLDIDLLENNDKLAAVYDHDSQQMHVIHYGKKATMFSNHNLSHQGFYSFPHPVRQNQQ

SEQ ID NO: 735 - DNA, 2130 bp, Streptococcus pyogenes
ttgggaacaaaaactacaactaagccaaaaacgggtactaaaaagtccaccactaaaaagaaatcaacagcgaaaaaaaatctcgttattgttgaatcacctgccaaagctaagactattgaaaaatatcttggacgcagttataaagttgttgcttcggtaggacatattcgtgacttaaaaaaatcgtctatgtctattgattttgataataattatgagccacaatacattaatatccgtggtaagggaccccttatcaattctttaaaaaaagaagccaaagctgctaaaaaagtttatttagctagtgacccggatcgtgagggagaggctatttcttggcatttgtcacatatcttaggacttgatcctcaagataataaccgagtggtttttaatgaaattacgaaagatgcagttaaacatgcctttgtggagcctcgtcagattgatatggacttggtagattctcaacaagcacgtcgtgttttggaccgtattgtgggatattccatttcaccaattctttggaaaaaggtcaaaaaaggactttcagcaggacgtgtccagtcggttgctttaaaactcatcattgaccgtgaaaatgacatcaaagcatttgttccaaaggaatactggtctattgatggtctttttaaaaaaggaactaaaaagtttcaagcgactttttacggtattaatggcaaaaaaacaaagcttgacaataacaacgatgtcaaagaggtattagcaaagctaacaaatgaagattttcttgtcagcaaggttgacaagaaagagcgacgtcgtaatgctcccttaccttacacaacatcatctcttcaacaagatgctgctaataaaatcaatttcagaacgcgtaaaaccatgatggtagcccaacaactgtatgaggggattcatttaggagaaaatggaactcaaggtttaattacctatatgcgtacggattctactcgtatcagtccagtagcacaaaacgatgctgctcaatttattatcaatcgctttggagctaattattcaaaacatggtaatcgtgtcaaaaataccagtggtgtccaagatgctcacgaggcgattcgtccatctagtgttaatcatacgccagactctattgccaaataccttaacaaggatcagttaaaactttatacgcttatttggaatcgttttgtggctagccaaatgacagcagctgtttttgataccgtaaaggtgaacttggagcaaaatggcgtgatttttgttgccaatggtagccaaatgaagtttgatggttacatggctgtttacaatgattccgataaaaacaaaatgttacctgagatggcagaaggagaaacggttaaaaaaatatcgacctctccagaacagcactttacgcagccaccagctcgttattctgaagcaactctaattaaaacgctagaagaaaatggtgttggacgtccatcaacttacgctccaaccttagaagtcattcaacgcagatactatgttaaattgtctgctaagcgctttgagccaactgagcttggggaaattgtcaacaagcttattgtcgaatttttcccagatattgtcgatgttgcctttactgccgagatggaaggtaagctagatcaagttgaaatcggagaagaacaatggcaacatgttatcgatcaattctatcaaccctttgtcaaagaattgaataaggctgagtctgaaattgaaaagattcaaatcaaagatgaaccagctggcttcgactgtgatgtttgtggtcacccaatggtcattaagttaggacgttttgggaaattttacgcgtgtagcaacttcccagagtgccgtaatacaaaagccatcactaaagaaattggtgttacttgtccggtttgtcataaaggacaagttatcgagcgtaaaaccaaaaaaaataggatattttatggttgtgatcagtatccagattgtgagtttatctcgtgggatttacctattggacgtgcttgccctaagtcaggtgactatcttattgagaaaaaagttcgtggtggcaaacaagtaatgtgtagcaatgagacctgtgattacaaggaagaaaaaattaaataa

SEQ ID NO: 736 - protein, 709 aa, Streptococcus pyogenes
MGTKTTTKPKTGTKKSTTKKKSTAKKNLVIVESPAKAKTIEKYLGRSYKVVASVGHIRDLKKSSMSIDFDNNYEPQYINIRGKGPLINSLKKEAKAAKKVYLASDPDREGEAISWHLSHILGLDPQDNNRVVFNEITKDAVKHAFVEPRQIDMDLVDSQQARRVLDRIVGYSISPILWKKVKKGLSAGRVQSVALKLIIDRENDIKAFVPKEYWSIDGLFKKGTKKFQATFYGINGKKTKLDNNNDVKEVLAKLTNEDFLVSKVDKKERRRNAPLPYTTSSLQQDAANKINFRTRKTMMVAQQLYEGIHLGENGTQGLITYMRTDSTRISPVAQNDAAQFIINRFGANYSKHGNRVKNTSGVQDAHEAIRPSSVNHTPDSIAKYLNKDQLKLYTLIWNRFVASQMTAAVFDTVKVNLEQNGVIFVANGSQMKFDGYMAVYNDSDKNKMLPEMAEGETVKKISTSPEQHFTQPPARYSEATLIKTLEENGVGRPSTYAPTLEVIQRRYYVKLSAKRFEPTELGEIVNKLIVEFFPDIVDVAFTAEMEGKLDQVEIGEEQWQHVIDQFYQPFVKELNKAESEIEKIQIKDEPAGFDCDVCGHPMVIKLGRFGKFYACSNFPECRNTKAITKEIGVTCPVCHKGQVIERKTKKNRIFYGCDQYPDCEFISWDLPIGRACPKSGDYLIEKKVRGGKQVMCSNETCDYKEEKIK

SEQ ID NO: 737 - DNA, 2166 bp, Streptococcus pyogenes
gtgattacaattaaaaatccaaaaatccttaagtggctaaagtatgtattaagtgcaattcttagccttattatccttgttattattattggtggtcttttgtttaccttctacattagcagtgctccgaaactgtcagaagcccagttaaaatcaacaaactctagcttggtttatgacggtaataacaatctgattgctgatttgggttctgaaaagcgtgaaaatgtaacagctgatagtatccctattaatctagttaatgctattacctcaattgaagataaacgtttctttaaccatcgtggagtagatctttatcgtatttttggtgctgcctttcataatctaacgagtcagaccactcaaggggggtcaacgcttgatcagcaactcattaaactagcctatttttctactaatgaatctgatcaaaccttaaaacgtaaggctcaagaagtttggcttgctcttcaaatggagcgaaaatatactaaacaagaaatcctgactttttacatcaacaaagtatatatgggtaatggcaactatggtatgctgacagccgctaagtcttattatggcaaggatcttaaggatttatcttatgcccaactagccctattggctggaatccctcaagctcctagtcaatatgatccttaccttcatcctgaagctgctcaaaatcgccgtaacgtcgtgttgcaacagatgtacatggaaaaacatctgacgaaagcagaatatgaaactgccatcgcaactcccgtcgctgaaggtctacaatcactccaacagcgctcaacttatccaaaatatatggataattatctaaaacaagttattgaagaagtcaaaaaagaaacgaataaagatatttttaccgctggtttaaaagtttataccaatattatccccgatgcgcagcagactctttataatatttatcattctggtgattatgtttactatccagaccaagatttccaagttgcttcaacgattgttgatgtgacaaatggtcatgttattgctcagcttggcggacgtaatcaagatgaaaatgtttcatttgggactaaccaagctgttttaactgatcgtgactggggttctaccatgaagccaatcacagcctatgctcctgctattgaatctggtgtttatacttctactgctcagtcgactaatgactcagtctattattggcctggaaccactacccaattgtttaactgggaccttagatataacggatggatgacaatccaagctgctattatgctatcgcgaaatgtcccagcagtccgagcactggaagccgcaggacttgactatgctcgatctttcttaagcagtttaggtattaactatcccgaaatgcactactcaaacgctatctcaagtaataacagtagctcagataaaaaatatggtgcaagtagtgaaaaaatggccgctgcatacgctgcttttgcaaatggtggtatttatcataaaccaaggtatgtcaataaagtggaatttagtgatggtacaagtaaaacttttgatgaaaaaggaaaacgtgccatgaaagaaaccacggcctatatgatgacagatatgttaaaaactgttctcacttatggtacaggtactgctgctgccattcctggtgttgcgcaagctggtaaaacagggacttctaactacactgatgaggaactagctaaaattggtgaaaaatacggcctttatccagattatgttggtacattagcgccagacgaaaactttgttggctttactaagcgctacgccatggctgtttggacaggttacaaaaaccgcttgaccccagtatacggatcaagtctagagattgcatctgacgtttatcgtagcatgatgacttacttaacaaatggttacagtgaagattggacgatgccaaatggtctttatcgcagtggtggattcctctacttaagcggaacctatgcgagcaacaccgactatactaattcggtttacaacaatctttacagcaataacacgacaacagcttctagccaaacgacttcagatgatactagtagtagcaatgatacaagtaattcaaccaatacagacaacaatggcagtcatccatctaccgatgataaaaagacaactcattaa

SEQ ID NO: 738 - protein, 721 aa, Streptococcus pyogenes
MITIKNPKILKWLKYVLSAILSLIILVIIIGGLLFTFYISSAPKLSEAQLKSTNSSLVYDGNNNLIADLGSEKRENVTADSIPINLVNAITSIEDKRFFNHRGVDLYRIFGAAFHNLTSQTTQGGSTLDQQLIKLAYFSTNESDQTLKRKAQEVWLALQMERKYTKQEILTFYINKVYMGNGNYGMLTAAKSYYGKDLKDLSYAQLALLAGIPQAPSQYDPYLHPEAAQNRRNVVLQQMYMEKHLTKAEYETAIATPVAEGLQSLQQRSTYPKYMDNYLKQVIEEVKKETNKDIFTAGLKVYTNIIPDAQQTLYNIYHSGDYVYYPDQDFQVASTIVDVTNGHVIAQLGGRNQDENVSFGTNQAVLTDRDWGSTMKPITAYAPAIESGVYTSTAQSTNDSVYYWPGTTTQLFNWDLRYNGWMTIQAAIMLSRNVPAVRALEAAGLDYARSFLSSLGINYPEMHYSNAISSNNSSSDKKYGASSEKMAAAYAAFANGGIYHKPRYVNKVEFSDGTSKTFDEKGKRAMKETTAYMMTDMLKTVLTYGTGTAAAIPGVAQAGKTGTSNYTDEELAKIGEKYGLYPDYVGTLAPDENFVGFTKRYAMAVWTGYKNRLTPVYGSSLEIASDVYRSMMTYLTNGYSEDWTMPNGLYRSGGFLYLSGTYASNTDYTNSVYNNLYSNNTTTASSQTTSDDTSSSNDTSNSTNTDNNGSHPSTDDKKTTH

SEQ ID NO: 739 - DNA, 2862 bp, Streptococcus pyogenes
ttgtcaaagaaaagattacatgaaattgccaaggaaattggtaaaagtagtaaagaggtggttgaacacgctaaatacttaggattagatgtgaaaagccatgcatcaagtgttgaagaagcggatgcgaaaaagattatttcaagtttttcaaaggcttctaaacctgatgtgacagcttctcaaacagtcaaacccaaagaagttgctcaaccctctgtaacagtggtcaaagaaacaggttctgagcatgtagagaaaacacaggtctctaagccaaagagtcgtaattttaaagctgaaagagaggctcgtgcaaaggaacaggctgctcgaaaacaagcaaatggctcttctcatcgttctcaagaacgtcgaggaggttatcgccagcccaataatcatcaaactaacgaacaaggagataagaggattacccatcgttctcaaggtgatacaaacgataagcgtattgagcgaaaagcatcgaatgtatcacctagacatgataatcatcagctagttggtgatcgtaaccgttcctttgctaaggagaatcacaagaatggtcgattcacaaaccaaaaaaagcaaggacgacaagagcctcaatcgaaaagtcctaaaattgatttcaaagctcgtgctgctgccttaaaagctgaacaaaatgctgaatactcacgccaaagtgaaacacgttttcgtgcacagcaagaagctaagcgtttagctgagttggcaagacaagaagctaaagaagcggctctaaaagcacaagctgaggagatgagccatcgtgaagcagcattgaaatctattgaagaagcagaaactaaattaaagtcatcaaatattagtgctaaatctactgctgataatcgccgtaaaaaacaagcacgtcctgaaaagaatcgtgagttaactcatcattcacaagaaggacaaaagaaaaataagaagagttggaatagtcaaaaccaagtgagaaatcaaaaaaatagtaactggaataaaaataaaaagaccaaaaaaggcaaaaatgttaagaataccaacaccgctccaaaaccagtaaccgagcgtaaattccatgaattgccaaaagaatttgaatatactgaaggcatgacagttgccgaaatcgcaaaacgtatcaaacgcgaacccgctgaaattgttaaaaagctgtttatgatgggtgttatggcaactcaaaaccaatctttagatggtgacactatcgaattattgatggtagattatggtattgaggctaaggctaaggtagaagtagatgatgctgatatcgagcgcttctttgaggatgaaaattacctcaatcctgaaaatattgtagaacgcgcacctgttgtaactatcatgggacacgtagaccacggtaagacaactttgcttgatactttgcgtaactcacgtgtggcaacaggagaagctggaggaattactcagcatattggtgcttaccagattgaagaagctggcaagaaaattaccttcttggatactcccggacacgcggcctttacaagtatgcgcgcacgtggagcttccgttaccgatatcaccattttgattgttgcagctgatgatggtgttatgccacaaacgattgaagcgatcaatcactcaaaagctgctggtgttccaattattgttgctatcaacaaaattgataaaccaggtgctaatccagaacgtgttatcgcagaattggcagaatatggtatcatctcaactgcttggggcggagagtgcgaatttgtagagatatctgctaaatttaataaaaatattgatgaactattagaaacagtccttttggttgctgaagtggaagaattgaaagctgatccgacggttcgtgctattggtactgtaattgaagcacgcttagataaaggtaaaggtgctatcgctacgcttcttgtccaacaaggaactcttcatgttcaagatccaatcgttgttggtaatacctttggtcgtgtccgtgccatggtaaatgaccttgggcgtcgtgttaaatctgcggagccatcaacaccagtttccattactggtttgaacgaaacaccaatggctggtgatcactttgctgtttacgctgatgaaaaagctgcgcgtgcagctggtgaggagcgatcaaaacgtgccctcctcaaacaacgtcaaaatacacagcgtgttagccttgataatctctttgatacccttaaagcaggagaaatcaagactgttaatgtcatcatcaaagcagacgttcaaggttctgttgaagcccttgcagcatctcttgtaaagattgaagtggaaggtgtccgtgtcaatgtcgttcactctgctgtaggtgctatcaatgagtctgatgtgacccttgctgaagcatcaaatgctgttattatcggtttcaacgttcgccctaccccacaagctcgtcaacaagcagatacggatgatgtggaaattcgtcttcatagtattatctataaagtcattgaagaagtagaagaagccatgaaagggaaacttgaccctgtttaccaagaaaaaattcttggtgaagccattatccgtgaaaccttcaaagtttctaaagtgggaacaattggtggctttatggtaatcaacggtaaggtgacacgtgattcgagtgttcgtgttatccgtgatagtgtcgttatttttgatggtaaactggccagcttgaaacattacaaagatgacgttaaagaagtcggtaatgctcaagaaggtgggttgatgattgaaaactttaacgatcttaaagttgacgatactattgaagcctatattatggaagaaattgtgagaaaatag

SEQ ID NO: 740 - protein, 953 aa, Streptococcus pyogenes
MSKKRLHEIAKEIGKSSKEVVEHAKYLGLDVKSHASSVEEADAKKIISSFSKASKPDVTASQTVKPKEVAQPSVTVVKETGSEHVEKTQVSKPKSRNFKAEREARAKEQAARKQANGSSHRSQERRGGYRQPNNHQTNEQGDKRITHRSQGDTNDKRIERKASNVSPRHDNHQLVGDRNRSFAKENHKNGRFTNQKKQGRQEPQSKSPKIDFKARAAALKAEQNAEYSRQSETRFRAQQEAKRLAELARQEAKEAALKAQAEEMSHREAALKSIEEAETKLKSSNISAKSTADNRRKKQARPEKNRELTHHSQEGQKKNKKSWNSQNQVRNQKNSNWNKNKKTKKGKNVKNTNTAPKPVTERKFHELPKEFEYTEGMTVAEIAKRIKREPAEIVKKLFMMGVMATQNQSLDGDTIELLMVDYGIEAKAKVEVDDADIERFFEDENYLNPENIVERAPVVTIMGHVDHGKTTLLDTLRNSRVATGEAGGITQHIGAYQIEEAGKKITFLDTPGHAAFTSMRARGASVTDITILIVAADDGVMPQTIEAINHSKAAGVPIIVAINKIDKPGANPERVIAELAEYGIISTAWGGECEFVEISAKFNKNIDELLETVLLVAEVEELKADPTVRAIGTVIEARLDKGKGAIATLLVQQGTLHVQDPIVVGNTFGRVRAMVNDLGRRVKSAEPSTPVSITGLNETPMAGDHFAVYADEKAARAAGEERSKRALLKQRQNTQRVSLDNLFDTLKAGEIKTVNVIIKADVQGSVEALAASLVKIEVEGVRVNVVHSAVGAINESDVTLAEASNAVIIGFNVRPTPQARQQADTDDVEIRLHSIIYKVIEEVEEAMKGKLDPVYQEKILGEAIIRETFKVSKVGTIGGFMVINGKVTRDSSVRVIRDSVVIFDGKLASLKHYKDDVKEVGNAQEGGLMIENFNDLKVDDTIEAYIMEEIVRK

SEQ ID NO: 741 - DNA, 2478 bp, Streptococcus pyogenes
gtgaagaaaacatatggttatatcggctcagttgctgctattttactagctactcatattggaagttaccaacttggtaagcatcatatgggttcagcaacaaaggacaatcaaattgcctatattgatgatagcaaaggtaaggcaaaagcccctaaaacaaacaaaacgatggatcaaatcagtgctgaagaaggcatctctgctgaacagatcgtagtcaaaattactgaccaaggctatgtgacctcacatggtgaccattatcatttttacaatgggaaagttccttatgatgcgattattagtgaagagttgttgatgacggatcctaattaccgttttaaacaatcagacgttatcaatgaaatcttagacggttacgttattaaagtcaatggcaactattatgtttacctcaagccaggtagcaagcgcaaaaacattcgaaccaaacaacaaattgctgagcaagtagccaaaggaactaaagaagctaaagaaaaaggtttagctcaagtggcccatctcagtaaagaagaagttgcggcagtcaatgaagcaaaaagacaaggacgctatactacagacgatggctatatttttagtccgacagatatcattgatgatttaggagatgcttatttagtacctcatggtaatcactatcattatattcctaaaaaggatttgtctccaagtgagctagctgctgcacaagcctactggagtcaaaaacaaggtcgaggtgctagaccgtctgattaccgcccgacaccagccccagccccaggtcgtaggaaagccccaattcctgatgtgacgcctaaccctggacaaggtcatcagccagataacggtggctatcatccagcgcctcctaggccaaatgatgcgtcacaaaacaaacaccaaagagatgagtttaaaggaaaaacctttaaggaacttttagatcaactacaccgtcttgatttgaaataccgtcatgtggaagaagatgggttgatttttgaaccgactcaagtgatcaaatcaaacgcttttgggtatgtggtgcctcatggagatcattatcatattatcccaagaagtcagttatcacctcttgaaatggaattagcagatcgatacttagccggccaaactgaggacgatgactcaggttcagatcactcaaaaccatcagataaagaagtgacacatacctttcttggtcatcgcatcaaagcttacggaaaaggcttagatggtaaaccatatgatacgagtgatgcttatgtttttagtaaagaatccattcattcagtggataaatcaggagttacagctaaacacggagatcatttccactatataggatttggagaacttgaacaatatgagttggatgaggtcgctaactgggtgaaagcaaaaggtcaagctgatgagcttgctgctgctttggatcaggaacaaggcaaagaaaaaccactctttgacactaaaaaagtgagtcgcaaagtaacaaaagatggtaaagtgggctatatgatgccaaaagatggcaaggactatttctatgctcgtgatcaacttgatttgactcagattgcctttgccgaacaagaactaatgcttaaagataagaaacattaccgttatgacattgttgacacaggtattgagccacgacttgctgtagatgtgtcaagtctgccgatgcatgctggtaatgctacttacgatactggaagttcgtttgttatccctcatattgatcatatccatgtcgttccgtattcatggttgacgcgcgatcagattgcaacaatcaagtatgtgatgcaacaccccgaagttcgtccggatatatggtctaagccagggcatgaagagtcaggttcggtcattccaaatgttacgcctcttgataaacgtgctggtatgccaaactggcaaattatccattctgctgaagaagttcaaaaagccctagcagaaggtcgttttgcaacaccagacggctatattttcgatccacgagatgttttggccaaagaaacttttgtatggaaagatggctcctttagcatcccaagagcagatggcagttcattgagaaccattaataaatctgatctatcccaagctgagtggcaacaagctcaagagttattggcaaagaaaaacgctggtgatgctactgatacggataaacccaaagaaaagcaacaggcagataagagcaatgaaaaccaacagccaagtgaagccagtaaagaagaagaaaaagaatcagatgactttatagacagtttaccagactatggtctagatagagcaaccctagaagatcatatcaatcaattagcacaaaaagctaatatcgatcctaagtatctcattttccaaccagaaggtgtccaattttataataaaaatggtgaattggtaacttatgatatcaagacacttcaacaaataaacccttaa

SEQ ID NO: 742 - protein, 825 aa, Streptococcus pyogenes
MKKTYGYIGSVAAILLATHIGSYQLGKHHMGSATKDNQIAYIDDSKGKAKAPKTNKTMDQISAEEGISAEQIVVKITDQGYVTSHGDHYHFYNGKVPYDAIISEELLMTDPNYRFKQSDVINEILDGYVIKVNGNYYVYLKPGSKRKNIRTKQQIAEQVAKGTKEAKEKGLAQVAHLSKEEVAAVNEAKRQGRYTTDDGYIFSPTDIIDDLGDAYLVPHGNHYHYIPKKDLSPSELAAAQAYWSQKQGRGARPSDYRPTPAPAPGRRKAPIPDVTPNPGQGHQPDNGGYHPAPPRPNDASQNKHQRDEFKGKTFKELLDQLHRLDLKYRHVEEDGLIFEPTQVIKSNAFGYVVPHGDHYHIIPRSQLSPLEMELADRYLAGQTEDDDSGSDHSKPSDKEVTHTFLGHRIKAYGKGLDGKPYDTSDAYVFSKESIHSVDKSGVTAKHGDHFHYIGFGELEQYELDEVANWVKAKGQADELAAALDQEQGKEKPLFDTKKVSRKVTKDGKVGYMMPKDGKDYFYARDQLDLTQIAFAEQELMLKDKKHYRYDIVDTGIEPRLAVDVSSLPMHAGNATYDTGSSFVIPHIDHIHVVPYSWLTRDQIATIKYVMQHPEVRPDIWSKPGHEESGSVIPNVTPLDKRAGMPNWQIIHSAEEVQKALAEGRFATPDGYIFDPRDVLAKETFVWKDGSFSIPRADGSSLRTINKSDLSQAEWQQAQELLAKKNAGDATDTDKPKEKQQADKSNENQQPSEASKEEEKESDDFIDSLPDYGLDRATLEDHINQLAQKANIDPKYLIFQPEGVQFYNKNGELVTYDIKTLQQINP

SEQ ID NO: 743 - DNA, 3546 bp, Streptococcus pyogenes
ttgcgtaaaaaacaaaaattaccatttgataaacttgccattgcgctcatgtctacgagcatcttgctcaatgcacaatcagacattaaagcaaatactgtgacagaagacactcctgctaccgaacaagctgtagaaaccccacaaccaacagcggtttctgaggaagcaccatcatcaaaggaaaccaaaaccccacaaactcctgatgacgcagaagaaacaatagcagatgacgctaatgatctagcccctcaagctcctgctaaaactgctgatacaccagcaacctcaaaagcgactattagggatttgaacgacccttctcaggtcaaaaccctgcaggaaaaagcaggcaaaggagctgggactgttgttgcagtgattgatgctggttttgataaaaatcatgaagcgtggcgcttaacagacaaaaccaaagcacgttaccaatcaaaagaagatcttgaaaaagctaaaaaagagcacggtattacctatggcgagtgggtcaatgataaggttgcttattaccacgactatagtaaagatggtaaaaccgctgtcgatcaagagcacggcacacacgtgtcagggatcttgtcaggaaatgctccatctgaaacgaaagaaccttaccgcctagaaggtgcgatgcctgaggctcaattgcttttgatgcgtgtcgaaattgtaaatggactagcagactatgctcgtaactacgctcaagctatcatagatgctgtcaacttgggagctaaggtgattaatatgagctttggtaatgctgcactagcctatgccaaccttccagacgaaaccaaaaaagcctttgactatgccaaatcaaaaggtgttagcattgtgacctcagctggtaatgatagtagctttgggggcaagacccgtctacctctagcagatcatcctgattatggggtggttgggacacctgcagcggcagactcaacattgacagttgcttcttacagcccagataaacagctcactgaaactgctacggtcaaaacagccgatcagcaagataaagaaatgcctgttctttcaacaaaccgttttgagccaaacaaggcttacgactatgcttatgctaatcgtgggatgaaagaggatgattttaaggatgtcaaaggtaagattgcccttattgaacgtggcgatattgatttcaaagataagattgcaaacgctaaaaaagctggtgctgtaggagtcttgatctatgacaatcaggacaagggcttcccgattgaattgccaaatgttgatcagatgcctgcggcctttatcagtcgaaaagatggtctcttattaaaagagaatccccaaaaaaccatcaccttcaatgcgacacctaaggtattgccaacagcaagtggcaccaaactaagccgcttctcaagctggggtctgacagctgacggcaatattaagccagatattgcagcacccggccaagatattttgtcatcagtggctaacaacaagtatgccaaactttctggaactagtatgtctgcgccattagtagcgggtatcatgggactgttgcaaaagcaatatgagacacagtatcctgatatgacaccatcagagcgtcttgatttagctaaaaaagtattgatgagctcagcaactgccttatatgatgaagatgaaaaagcttatttttctcctcgccaacaaggagcaggagcagtcgatgctaaaaaagcttcagcagcaacgatgtatgtgacagataaggataatacctcaagcaaggttcacctgaacaatgtttctgataaatttgaagtaacagtaacagttcacaacaaatctgataaacctcaagagttgtattaccaagcaactgttcaaacagataaagtagatggaaaactctttgccttggctcctaaagcattgtatgagacatcatggcaaaaaatcacaattccagccaatagcagcaaacaagtcaccattccaatcgatgttagtcaatttagcaaggacttgcttgccccaatgaaaaatggctatttcttagaaggttttgttcgtttcaaacaagatcctacaaaagaagagcttatgagtattccctatattggtttccgaggtgattttggcaatctgtcagccttagaaaaaccaatctatgatagcaaagacggtagcagctactatcatgaagcaaatagtgatgccaaagaccaattagatggtgatggattacagttttacgctctgaaaaataactttacagcacttactacagagtctaatccatggacgattattaaagctgtcaaagaaggggttgaaaacatagaggatatcgaatcttcagagatcacagaaaccatttttgcaggtacttttgcaaaacaagacgatgatagccactactatatccaccgtcacgctaatggcaagccatatgctgcgatctctccaaatggggacggtaacagagattatgtccaattccaaggtactttcttgcgtaatgctaaaaaccttgtggctgaagtcttggacaaagaaggaaatgttgtttggacaagtgaggtaaccgagcaagttgttaaaaactacaacaatgacttggcaagcacacttggttcaacccgttttgaaaaaacgcgttgggacggtaaagataaagacggcaaagttgttgctaacggaacatacacctatcgtgttcgctacactccgattagctcaggtgcaaaagaacaacacactgattttgatgtgattgtagacaatacgacacctgaagtcgcaacatcggcaacattctcaacagaagatcgtcgtttgacacttgcatctaaaccaaaaaccagccaaccggtttaccgtgagcgtattgcttacacttatatggatgaggatctgccaacaacagagtatatttctccaaatgaagatggtacctttactcttcctgaagaggctgaaacaatggaaggcgctactgttccattgaaaatgtcagactttacttatgttgttgaagatatggctggtaacatcacttatacaccagtgactaagctattggaaggccactctaataaaccagaacaagacggttcagatcaagcaccagacaaaaaaccagaaactaaaccagaacaagacggttcaggtcaagcaccagataaaaaaccagaaactaaaccagaacaagacggttcaggtcaaacaccagacaaaaaaccagaaactaaaccagaacaagacggttcaggtcaaacaccagataaaaaaccagaaactaaaccagaaaaagatagttcaggtcaaacaccaggtaaaactcctcaaaaaggtcaaccttctcgtactctagagaaacgatcttctaagcgtgctttagctacaaaagcatcaacaaaagatcagttaccaacgactaatgacaaggatacaaatcgtttacatctccttaagttagttatgaccactttcttcttgggattagtagctcatatctttaaaacaaaacgcactgaagattag

SEQ ID NO: 744 - protein, 1181 aa, Streptococcus pyogenes
MRKKQKLPFDKLAIALMSTSILLNAQSDIKANTVTEDTPATEQAVETPQPTAVSEEAPSSKETKTPQTPDDAEETIADDANDLAPQAPAKTADTPATSKATIRDLNDPSQVKTLQEKAGKGAGTVVAVIDAGFDKNHEAWRLTDKTKARYQSKEDLEKAKKEHGITYGEWVNDKVAYYHDYSKDGKTAVDQEHGTHVSGILSGNAPSETKEPYRLEGAMPEAQLLLMRVEIVNGLADYARNYAQAIIDAVNLGAKVINMSFGNAALAYANLPDETKKAFDYAKSKGVSIVTSAGNDSSFGGKTRLPLADHPDYGVVGTPAAADSTLTVASYSPDKQLTETATVKTADQQDKEMPVLSTNRFEPNKAYDYAYANRGMKEDDFKDVKGKIALIERGDIDFKDKIANAKKAGAVGVLIYDNQDKGFPIELPNVDQMPAAFISRKDGLLLKENPQKTITFNATPKVLPTASGTKLSRFSSWGLTADGNIKPDIAAPGQDILSSVANNKYAKLSGTSMSAPLVAGIMGLLQKQYETQYPDMTPSERLDLAKKVLMSSATALYDEDEKAYFSPRQQGAGAVDAKKASAATMYVTDKDNTSSKVHLNNVSDKFEVTVTVHNKSDKPQELYYQATVQTDKVDGKLFALAPKALYETSWQKITIPANSSKQVTIPIDVSQFSKDLLAPMKNGYFLEGFVRFKQDPTKEELMSIPYIGFRGDFGNLSALEKPIYDSKDGSSYYHEANSDAKDQLDGDGLQFYALKNNFTALTTESNPWTIIKAVKEGVENIEDIESSEITETIFAGTFAKQDDDSHYYIHRHANGKPYAAISPNGDGNRDYVQFQGTFLRNAKNLVAEVLDKEGNVVWTSEVTEQVVKNYNNDLASTLGSTRFEKTRWDGKDKDGKVVANGTYTYRVRYTPISSGAKEQHTDFDVIVDNTTPEVATSATFSTEDRRLTLASKPKTSQPVYRERIAYTYMDEDLPTTEYISPNEDGTFTLPEEAETMEGATVPLKMSDFTYVVEDMAGNITYTPVTKLLEGHSNKPEQDGSDQAPDKKPETKPEQDGSGQAPDKKPETKPEQDGSGQTPDKKPETKPEQDGSGQTPDKKPETKPEKDSSGQTPGKTPQKGQPSRTLEKRSSKRALATKASTKDQLPTTNDKDTNRLHLLKLVMTTFFLGLVAHIFKTKRTED

SEQ ID NO: 745 - DNA, 570 bp, Streptococcus pyogenes
atggtaaaaatgattgttggtctgggaaatccaggctctaaatatgaaaaaacaaagcacaatattggttttatggctattgacaatattgtcaagaaccttgacgttacctttacagatgataaaaattttaaagcacagataggaagtacttttattaatcatgaaaaagtttactttgtgaaacctactacttttatgaataatagcggcatagcagtaaaagcattactaacctactataatattgacataacagatttaattgttatctatgatgatttagacatggaagtcagtaaattacgtttacgtagtaagggttcagcaggaggacataatggcattaagtcaatcattgcccacattggaactcaggaatttaaccgaatcaaagttggtattggacgacctttaaaaggtatgactgttattaaccatgtgatgggccaattcaataccgaagataatattgctatttcgttaactcttgacagagttgtcaatgctgtcaagttttatttacaagaaaatgattttgaaaaaacaatgcagaaatttaatggataa

SEQ ID NO: 746 - protein, 189 aa, Streptococcus pyogenes [sequence omitted]

SEQ ID NO: 747 - DNA, 1392 bp, Streptococcus pyogenes
atgactatttttcgtaaaaaaaagaaatattccaataaaacagaaatgcaaaggcacttcaaagttattgatttagtttttttaggcctaggttcaatggttggaacaggtatctttacagttactggcataggcgctgctaagtatgcaggtcctgctttaacaatatcgattatcatttccgcgattgctattggaattttagccttattttatgcagaatttgcgtctcgtatgccttctaacggtggtgcttatagttatgtttatgcaaccttgggagagtttccagcatggcttgttggctggtatattattatggaatttttaacagctatatctagtgttgctgttggctggggaagttatttaaaaggattacttgccaattataatatagtattaccaaacgctttaaatggcacgttcaatcttaagaatggaacttacatagatattcttcctgttttagtgatgtttttcgtgacagggattgtcctaatgaattcgaaattagccctgagattcaatagttttttagttattttaaaattttcagcactggctttatttatctttgtaggcattttttttattgatcacaataattggtctcattttgctccatatggtgtaggacaaattactggaggtaaaacaggtatctttgctggtgcttctgttatgttctttgcatttttaggatttgaatctatttcaatggcagttgatgaagtgaaagaaccacaaaaaacaatccctaaaggcatcattttatctttgattattgtaacagcactctatatagttgtcaccactattttaacgggaattgtacactacactaaattaaatgttccagacgcggtggcttttgctttaagaaatattagactttattgggcagctgactatgtgtcgatagttgctattttgactcttattacggtatgtatttctatgacctatgcattagctagaacaatttacagtattagtagagatggtttattacctaaatcactttatactctcactaaaaaaaataaagtgcctcaaaatgctactcttgtcactggactacttgctatgatttgtgcgggaatatttcctttatcgagtctagcagagtttgttaatatttgtactttagcatatttaattattctgtcgggtgcaattattaaactcagaagaatagaaggagaaccaaaagcaaatgaatttaaaactcctctagtaccattcctaccaatgttggcaattatcatttgtctatcatttatgagccaatataaagcttttacttggattgcttttgctattgccacaattattggaacattaatctacttagcttatggttatactcattcaatagaaaataaataa

SEQ ID NO: 748 - protein, 463 aa, Streptococcus pyogenes
MTIFRKKKKYSNKTEMQRHFKVIDLVFLGLGSMVGTGIFTVTGIGAAKYAGPALTISIIISAIAIGILALFYAEFASRMPSNGGAYSYVYATLGEFPAWLVGWYIIMEFLTAISSVAVGWGSYLKGLLANYNIVLPNALNGTFNLKNGTYIDILPVLVMFFVTGIVLMNSKLALRFNSFLVILKFSALALFIFVGIFFIDHNNWSHFAPYGVGQITGGKTGIFAGASVMFFAFLGFESISMAVDEVKEPQKTIPKGIILSLIIVTALYIVVTTILTGIVHYTKLNVPDAVAFALRNIRLYWAADYVSIVAILTLITVCISMTYALARTIYSISRDGLLPKSLYTLTKKNKVPQNATLVTGLLAMICAGIFPLSSLAEFVNICTLAYLIILSGAIIKLRRIEGEPKANEFKTPLVPFLPMLAIIICLSFMSQYKAFTWIAFAIATIIGTLIYLAYGYTHSIENK

SEQ ID NO: 749 - DNA, 963 bp, Streptococcus pyogenes
atgtcttattctgatttaaaattgtttgctttatcgtcaaacaaggaattagcagaaaaagttgcgtctgcaatgggtattcaacttggaaagtctacggttcgccagttttcagatggtgaaatccaagtaaatattgaagaatcaattcgtggtcatcatgtctttattttgcaatcaactagctcacctgtcaatgataatttaatggaaattttgattatggtcgatgctttaaagcgtgctagtgctgaaaaaatttcagttgtgatgccttactacggctatgcacgccaagaccgtaaagcgcgttctcgtgaacctattacttcaaaattagttgctaatatgttagaagttgctggtgtagatcgcttattaacggttgatttacatgctgctcaaattcaagggttctttgatattccagttgatcacttgatgggtgcacctttaattgcagactattttgatcgtcatggtttagtgggtgaagatgttgtcgttgttagtcctgaccatggtggtgtgactcgtgcgcgtaaattagcacaattcctccaaacaccaattgcaattatcgataagcgtcgtagtgtggataagatgaacaccagtgaagtgatgaatattatcggaaatgtttcggggaagaaatgtatcttgattgacgatatgattgataccgcagggactatttgccatgcagcagatgcgcttgctgaagcgggggcaacagctgtgtatgcgtcatgtacgcatcccgttctttctggaccagcacttgataatattcaacgttcggctatcgaaaaactaattgttcttgatactatttatctgccaaaagaacgccttattgataaaattgaacaaatttcaattgctgatttggttgcagaagcgattattcgtattcatgaaaaacgtccgttgtcacctttatttgagatgggcaattaa

SEQ ID NO: 750 - protein, 320 aa, Streptococcus pyogenes
MSYSDLKLFALSSNKELAEKVASAMGIQLGKSTVRQFSDGEIQVNIEESIRGHHVFILQSTSSPVNDNLMEILIMVDALKRASAEKISVVMPYYGYARQDRKARSREPITSKLVANMLEVAGVDRLLTVDLHAAQIQGFFDIPVDHLMGAPLIADYFDRHGLVGEDVVVVSPDHGGVTRARKLAQFLQTPIAIIDKRRSVDKMNTSEVMNIIGNVSGKKCILIDDMIDTAGTICHAADALAEAGATAVYASCTHPVLSGPALDNIQRSAIEKLIVLDTIYLPKERLIDKIEQISIADLVAEAIIRIHEKRPLSPLFEMGN

SEQ ID NO: 751 - DNA, 1455 bp, Streptococcus pyogenes
atgacatacgaagtaaaatctctaaatgaagaatgtggagtctttggtatctggggacatcctcaggcagctcaagtcacttactttgggcttcatagccttcaacatcgcggtcaagaaggagctggtattgtttcaaatgacaatgggaaactctatggttatcgaaatgttgggctcctttctgaagtttttaagaatcaatctgaattagataatttaactgggaatgcggctattggacatgttcggtatgctactgcaggttctgcagatattcgcaatattcagccttttctttataaatttcatgacgggcaatttgctttatgccataatggtaatttgacaaatgctatttccttaaggaaagaattagaaaagcaaggtgcaattttcaatgcctcctcagatactgaaattttgatgcacttgattcgtcgaagccataactcaagtttcatgggaaaggtaaaagaagctctaaatacagtaaagggtggctttgcctatctactgatgacagaaaataaactcattgctgctcttgaccctaatgcctttcgtcctttgtcaattggacaaatgcaaaatggtgcctgggttatttccagtgagacctgtgcttttgaggtggtaggcgcaaaatgggttagagatgttgaacctggcgaagttattcttatagacgatcgtggtattcaatgtgatcgttatactgatgaaacgcaactggcaatttgttcgatggaatatgtctattttgcaaggccggattcaactatacatggtgttaatgttcatacggctcgaaaaaatatgggaaagcgtcttgcacaagaatttaaacaggatgctgatattgtaattggtgtcccaaattcgtccttatcggctgctatgggctttgctgaagaatccggattaccaaatgagatgggtcttgtaaaaaatcagtatacgcagcgaacctttattcaaccgacacaagaattaagggaacaaggtgttcgaatgaaactatcagcggtatccggtgttgtcaaaggaaagcgcgttgttatgattgatgactcaattgtaagaggaacgacttctagaaggattgtcggattattaagagaagcaggagctagtgaagtacatgttgctatagctagtccagaattaaagtatccttgtttttatggtattgatattcagactcgtcgtgagttgatttcagccaatcactctgttgatgaagtgtgtgatattattggcgcagatagtctgacctatctctcactggatgggttgattgaatcaattggactcgaaacaaaagcaccaaatggtggtttatgcgtagcttactttgatgggcattatccaacaccgctttatgattatgaagaagaatacctcagaagtttagaagagaaaacaagtttttatattcaaaaagtgaaataa

SEQ ID NO: 752 - protein, 484 aa, Streptococcus pyogenes
MTYEVKSLNEECGVFGIWGHPQAAQVTYFGLHSLQHRGQEGAGIVSNDNGKLYGYRNVGLLSEVFKNQSELDNLTGNAAIGHVRYATAGSADIRNIQPFLYKFHDGQFALCHNGNLTNAISLRKELEKQGAIFNASSDTEILMHLIRRSHNSSFMGKVKEALNTVKGGFAYLLMTENKLIAALDPNAFRPLSIGQMQNGAWVISSETCAFEVVGAKWVRDVEPGEVILIDDRGIQCDRYTDETQLAICSMEYVYFARPDSTIHGVNVHTARKNMGKRLAQEFKQDADIVIGVPNSSLSAAMGFAEESGLPNEMGLVKNQYTQRTFIQPTQELREQGVRMKLSAVSGVVKGKRVVMIDDSIVRGTTSRRIVGLLREAGASEVHVAIASPELKYPCFYGIDIQTRRELISANHSVDEVCDIIGADSLTYLSLDGLIESIGLETKAPNGGLCVAYFDGHYPTPLYDYEEEYLRSLEEKTSFYIQKVK

SEQ ID NO: 753 - DNA, 492 bp, Streptococcus pyogenes
atgaaaactccaattatttctattatcatgggctccaaatctgactgggcaaccatgcaaaaaacggctgaagttctagacaactttggcattgcttacgagaagaaagtcgtctctgcccaccgtacgccagacctcatgttcaagcatgctgaggaagcacgtggtcgtggcatcaaaatcatcatcgcaggagcaggtggggcagctcacttgcctggtatggtggcagctaaaacaacgctgcctgttatcggtgtgcctgtcaaatcacgtgccctttcaggtttggattcgctatattccattgtgcagatgcctggcggtgtgcctgtggcaaccatggctatcggagaagcgggagcgactaacgctgccctgacagccctccgtatcctctctatcgaggaccaaaatctggctgatgcgctagctcatttccatgaggaacaaggaaaaatcgcagaggagtcaagtggtgaactcatttaa

SEQ ID NO: 754 - protein, 163 aa, Streptococcus pyogenes
MKTPIISIIMGSKSDWATMQKTAEVLDNFGIAYEKKVVSAHRTPDLMFKHAEEARGRGIKIIIAGAGGAAHLPGMVAAKTTLPVIGVPVKSRALSGLDSLYSIVQMPGGVPVATMAIGEAGATNAALTALRILSIEDQNLADALAHFHEEQGKIAEESSGELI

SEQ ID NO: 755 - DNA, 999 bp, Streptococcus pyogenes
atggctagaattttagacaataatgtaatgggaaatgaggagttttcggatcggactcttcgccctcaatatctacacgaatatattggacaagataaagttaaggaacaattcgctatttttatagaagcagctaaaagacgtgacgaatctttagaccatgttttattatttggacctccaggactgggaaaaacaacaatggcatttgtgattgccaatgaattgggagttaatttaaagcaaacttcaggtcctgccgttgagaaagctggagatttggtagctattttaaatgaattagaaccaggggatattttgtttattgatgaaattcaccgcatgccaatgtctgtcgaggaagtactatatagtgctatggaagacttctatattgatattatgattggcgctggagatactagtcgtagtattcatttggatctgcctccatttacattgattggtgctactacacgtgcaggcatgttatctaatcccctcagagctcgttttggtatcactggtcacatggaatactatcaagaaaaggatttgacagagattgtggagcgtacagctactatttttgaaataaaaatagaccatgaagctgcacggaaattagcttgtcgcagtagaggaacgccccgcattgctaatcgattactaaaacgagtgcgtgactatgctcaaattattggtgatggcatcataacggctcaaataactgatagagctttgactatgttagatgttgaccgcgaaggtctcgattacattgatcagaaaattttacgaacgatgattgagatgtatcagggagggccagttggtttggggacattatctgtgaatattgccgaggagcgtaatacagttgaagagatgtatgaaccctacttaattcaaaaaggctttctcatgcgaacacgaacaggtcgtgtagcgacgcaaaaggcttatcgtcatcttggctatccctatcaaaacacttaa

SEQ ID NO: 756 - protein, 332 aa, Streptococcus pyogenes
MARILDNNVMGNEEFSDRTLRPQYLHEYIGQDKVKEQFAIFIEAAKRRDESLDHVLLFGPPGLGKTTMAFVIANELGVNLKQTSGPAVEKAGDLVAILNELEPGDILFIDEIHRMPMSVEEVLYSAMEDFYIDIMIGAGDTSRSIHLDLPPFTLIGATTRAGMLSNPLRARFGITGHMEYYQEKDLTEIVERTATIFEIKIDHEAARKLACRSRGTPRIANRLLKRVRDYAQIIGDGIITAQITDRALTMLDVDREGLDYIDQKILRTMIEMYQGGPVGLGTLSVNIAEERNTVEEMYEPYLIQKGFLMRTRTGRVATQKAYRHLGYPYQNT

SEQ ID NO: 757 - DNA, 1017 bp, Streptococcus pyogenes
atgaaagccgtagttgttaatcaagctagtacaggtgtcgaagttgttgagcatgatcttccaaatattggtcatggtgaagcgcttgttaaagtagaatactgtggcgtttgtcatactgatttacacgttgcacatggcgattttggtcaggtaccaggacgtattttggggcacgaaggtattggtatagtagaagaaattggagaaggcgtaacatccttaaaggttggtgatcgtgtctctattgcatggttctttgaaggatgtggtcattgcgaatactgtactacaggacgtgagacactttgtcgtagtgttaaaaatgctggatacagtgttgatggaggaatgagtgaatatgcagtagtaacagctgattatgcagttaaagttccagaaggtttagacccggctcaagcttcttccattacttgtgctggtgtaacaacttataaagctattaaagaggcaggtgctgctccaggccaatggattgttatctttggggctggtggccttggaaatctggctgttcaatacgctaaaaaagtctttaatgcacatgttgtcgcagtggacattaataatgataaacttgagttagctaaagaagttggcgcagatattttagttaacggcaaagaaattgaagatgttccaggctatattcaagaaaaaaccggtggagcacatggtgttgtggtaacggctgtttctaaagttgcttttaaccaagcaattgatagtgtccgtgccggtggaacagttgtagccgtaggtcttccatcagaatacatggaactgtctatcgtaaaaactgttttagatggtatcaaagtggtcggatcacttgtagggacacgtaaagacttggaagaagcctttgcctttggtgcagaaggtctggttgctccggttgtcgaaaaagttccagttgacactgctccagaagtctttgatgaaatggaacgtggtttaatccaagggcgcaaggtcttagatttcatcagctaa

SEQ ID NO: 758 - protein, 338 aa, Streptococcus pyogenes
MKAVVVNQASTGVEVVEHDLPNIGHGEALVKVEYCGVCHTDLHVAHGDFGQVPGRILGHEGIGIVEEIGEGVTSLKVGDRVSIAWFFEGCGHCEYCTTGRETLCRSVKNAGYSVDGGMSEYAVVTADYAVKVPEGLDPAQASSITCAGVTTYKAIKEAGAAPGQWIVIFGAGGLGNLAVQYAKKVFNAHVVAVDINNDKLELAKEVGADILVNGKEIEDVPGYIQEKTGGAHGVVVTAVSKVAFNQAIDSVRAGGTVVAVGLPSEYMELSIVKTVLDGIKVVGSLVGTRKDLEEAFAFGAEGLVAPVVEKVPVDTAPEVFDEMERGLIQGRKVLDFIS

SEQ ID NO: 759 - DNA, 1305 bp, Streptococcus pyogenes
atgttcttaaaaatactaaaagacgcgttaaagataaagactgtacggaataaaattttctttactatatttatcattcttgtattccgaattgggacacatattaccgtacctggtgtaaatgccaagagcttagagcaattaagtgaactccctttcttaaatatgttaaacttagttagtggtaatgcgatgagaaatttctcagtattttcaatgggggttagcccatatattactgcttctatcgttgttcagttattgcagatggatattttacctaagtttgttgagtggggcaaacaaggtgaggttggacgtcgtaaattaaatcaagcgacgcgctatatttcacttgttttggcttttgcccaatccattggtatcactgcagggtttaatactttgtcgaacgttgcacttgttaagacaccagacatcaaaacatatttactgatcggggcattactgacaacaggtagcgttattgttacctggcttggagaacaaatcacagataaaggatttggtaatggcgtatcaatgattatctttgcgggtattatttcgtctattccaagtgcaattgcaacaattcgtgaagactattttgtaaatgttaaggcaagtgatttacactcgtcttatctcattgttgggattttaatcatagctgttcttgctattgttttctttacaacatatgtccaacaagcggaatataaaattccaatccaatacacaaagctaatgcaaggtgcacctacaagttcatatcttccattaaaagtaaatccagccggcgttattcccgttatctttgctagctcgattacaactatcccaagtacgattattccttttgttcaaaatggtagagatttaccgtggttaaaccgtttgcaagaaatttttaattatcaaactccagtcggaatgatagtttacgccttgttgattatattgttctcattcttctatacctttgtacaagttaatcctgagaagacagcagaaaatcttcagaagaattcctcatatataccaagtgttcgccctggacgtgagacagaacaatttatgtccgcattgctaaaaaaactagcaaccgtaggagctatcttcttagcatttatctctttagcgccaatagcagcacaacaagctctcaacctttcttctagtattgctttaggtggaactagtttgctcattttgatttcaactggtatcgaaggtatgaaacagcttgagggatatcttctaaagagaaaatatgtcggatttatgaatacagcagaatag

SEQ ID NO: 760 - protein, 434 aa, Streptococcus pyogenes
MFLKILKDALKIKTVRNKIFFTIFIILVFRIGTHITVPGVNAKSLEQLSELPFLNMLNLVSGNAMRNFSVFSMGVSPYITASIVVQLLQMDILPKFVEWGKQGEVGRRKLNQATRYISLVLAFAQSIGITAGFNTLSNVALVKTPDIKTYLLIGALLTTGSVIVTWLGEQITDKGFGNGVSMIIFAGIISSIPSAIATIREDYFVNVKASDLHSSYLIVGILIIAVLAIVFFTTYVQQAEYKIPIQYTKLMQGAPTSSYLPLKVNPAGVIPVIFASSITTIPSTIIPFVQNGRDLPWLNRLQEIFNYQTPVGMIVYALLIILFSFFYTFVQVNPEKTAENLQKNSSYIPSVRPGRETEQFMSALLKKLATVGAIFLAFISLAPIAAQQALNLSSSIALGGTSLLILISTGIEGMKQLEGYLLKRKYVGFMNTAE

SEQ ID NO: 761 - DNA, 816 bp, Streptococcus pyogenes
atgcttgatattttattctatgatttcatgcaacgggcggtaatggcggtagttgccattagtatttttgctccgattttaggtattttccttattttacgtcgtcaaagtttgatgagcgatacccttagtcatgtttctttggctggggtagcgcttggggtagtccttggtatttcaccaaccatcactactattattgttgtggttttagctgctattttgttagaatacctgcgtgtagtttacaaacactacatggagatttcaacggcgattttgatgtcacttggcttggccctatctctgattattatgagtaagtcgcatagttcatcaagcatgagtttagaacaatacctttttggatcgatcatcacgattagtatggaacaagttgtcgccttgtttgctattgctgcgattattttaatcttgaccgttctcttcattagaccgatgtacattctgacctttgatgaagatactgcttttgtagatggtttgcccgttcgcttgatgtctgttctattcaatatcgtcactggggttgctattgctttgaccattccagcagcaggagcacttttggtttctaccattatggtcttgccagcaagtatcgcaatgagattgggtaaaaactttaaaacagttatcttactgggaattgtcatcggttttagcggtatgttatctggtattttcttatcttatttctttgaaacgccagctagtgccactattaccatgattttcattagtattttcctcttagttagtctaggtggaatgcttaaaaaacggttattttaa

SEQ ID NO: 762 - protein, 271 aa, Streptococcus pyogenes
MLDILFYDFMQRAVMAVVAISIFAPILGIFLILRRQSLMSDTLSHVSLAGVALGVVLGISPTITTIIVVVLAAILLEYLRVVYKHYMEISTAILMSLGLALSLIIMSKSHSSSSMSLEQYLFGSIITISMEQVVALFAIAAIILILTVLFIRPMYILTFDEDTAFVDGLPVRLMSVLFNIVTGVAIALTIPAAGALLVSTIMVLPASIAMRLGKNFKTVILLGIVIGFSGMLSGIFLSYFFETPASATITMIFISIFLLVSLGGMLKKRLF

SEQ ID NO: 763 - DNA, 849 bp, Streptococcus pyogenes
atggaagagtctttattaaaaggacaaggcttagcagatatgttgtcgggtttaggtttttcagatgctattcttactcaaattagtttagctgatagacacggtaatattgaaacaacattagtagcgattcaacattacttgaaccaaatggcaaggatcagacgaaaaactgttgaagttatcacctatcctcttattcttttactttttctttttgtgatgatgctagggttgagacgctatttagtccctcaattagaaactcaaaatcagataacttactttcttaaccattttcctgccttctttataggtttttgctcaggtcttattttgttgttcgggatggtatggctacgatggcgatctcaaagccgcttgaaactctatagtcggctaagccgttatccttttttaggtaaactgttaaaacaatacttaactagttattatgctagagaatggggtacgttaataggtcaaggtcttgatttgatgactattttagacattatggccattgagaaatcctcactaatgaaagaattagctgaggacatcagaatgagtctgcttgaagggcaagcctttcacattaaagtagctacctaccctttttttaaaaaagaattaagtttaatgattgaatacggtgaaatcaaatcgaaactgggggctgagttggaaatctatgcccaggaaagctgggaacaattttttagtcagctttatcaagtgacacaacttattcaaccagctatttttttagtagttgctgtgacaatcgtcatgatttatgcggcaatcctattaccaatttaccaaaatatgggaggtattttttaa

SEQ ID NO: 764 - protein, 282 aa, Streptococcus pyogenes
MEESLLKGQGLADMLSGLGFSDAILTQISLADRHGNIETTLVAIQHYLNQMARIRRKTVEVITYPLILLLFLFVMMLGLRRYLVPQLETQNQITYFLNHFPAFFIGFCSGLILLFGMVWLRWRSQSRLKLYSRLSRYPFLGKLLKQYLTSYYAREWGTLIGQGLDLMTILDIMAIEKSSLMKELAEDIRMSLLEGQAFHIKVATYPFFKKELSLMIEYGEIKSKLGAELEIYAQESWEQFFSQLYQVTQLIQPAIFLVVAVTIVMIYAAILLPIYQNMGGIF

SEQ ID NO: 765 - DNA, 954 bp, Streptococcus pyogenes
atgacttttgaaaaaattgaagaagcttatcagctgctcttagagaactgtcaactaattgaaaatgatctaaaaacacatatatacgatgccattgttgaacaaaactccttttatttaggggctgagggagctagtcctcaagttgctcaaaatagtgataaactgaaagccttgtgcctgacaaaagaagaatggcgtaaggcctaccagtttctttttattaaggcagctcagactgagcaactccaagccaaccatcagttcacaccagatgctattggcttcattctgctgtatcttttggaacaattgagtgataaagatagcttagaggtacttgagattggaagtggaacagggaacctagcccaaacccttctcaacaacacgagcaagagccttgattatgtagggattgaacttgatgatctcttgattgatctgtcagccagtattgctgagataatggattcttcagctcattttattcaagaagatgcggtaaggcctcaattactaaaagaaagtgacattgtcatcagtgacttaccagttggttattatcctaacgatgatattgccaaacggtacaaggtggctagttcagataagcatacctatgcccatcatttattaatggaacagtctttaaaatacttgaaaaaagacggttttgcgatttttctggcaccagtcaatttattgacgagccctcagagccagttgttgaaacagtggttaaaagattatgctcaggtggtgaccttgattacgctaccagattctatttttggtcatccctcaaatgccaagtccattattgtcttacaaaaacaaacagaccacccaatggaaacctttgtctatccaattcgggatttgaagcttgcagagaatattcatgattttatggaaaatttcaaaaaatggaaactgagtaatgtcaattaa

SEQ ID NO: 766 - protein, 317 aa, Streptococcus pyogenes
MTFEKIEEAYQLLLENCQLIENDLKTHIYDAIVEQNSFYLGAEGASPQVAQNSDKLKALCLTKEEWRKAYQFLFIKAAQTEQLQANHQFTPDAIGFILLYLLEQLSDKDSLEVLEIGSGTGNLAQTLLNNTSKSLDYVGIELDDLLIDLSASIAEIMDSSAHFIQEDAVRPQLLKESDIVISDLPVGYYPNDDIAKRYKVASSDKHTYAHHLLMEQSLKYLKKDGFAIFLAPVNLLTSPQSQLLKQWLKDYAQVVTLITLPDSIFGHPSNAKSIIVLQKQTDHPMETFVYPIRDLKLAENIHDFMENFKKWKLSNVN

SEQ ID NO: 767 - DNA, 285 bp, Streptococcus pyogenes
atgagtaaaaagaaaataggtatgatttcaggtatctttggatttagtttagctattggcctaggaatagttatcaaagattattgccaagacaggcagcgtcgacaaatgacaagggatttacgcacctttttttcacctttaggacaaatcgaagttttatatatcaatccttgtcaggtcaaacaagattatatttcaggtggggttgttatgtcaaacggcaaacagtaccaattcacctatcacagtcgacaaattagttttgaggaggacaagggatga

SEQ ID NO: 768 - protein, 94 aa, Streptococcus pyogenes
MSKKKIGMISGIFGFSLAIGLGIVIKDYCQDRQRRQMTRDLRTFFSPLGQIEVLYINPCQVKQDYISGGVVMSNGKQYQFTYHSRQISFEEDKG

SEQ ID NO: 769 - DNA, 1353 bp, Streptococcus pyogenes
ttgaccaggaccaattaccagaagaagcggatgacttgcccagtagaaacagaagacattacttatagacgcaagaaaatcaaaggaagacgtcaagctattctagctcaatttgaacctgagcttgttcaccacgaattaattggtgacagctgtacttgtccggattgtcatggaacattgacagaaattggctcggtggttcaacgtcaagaattagtctttatcccagcacaattgaaacgtataaatcatgtgcaacacgcttataagtgccaaacttgtagcgataatagcctcagtgacaagatcatcaaagcgcctgttcctaaggcaccattagctcatagccttggttcggcttctattattgcccataccgttcatcaaaaattcacccttaaagttcctaactacagacaggaagaggattggaataaattaggactgtccattagtcgcaaggaaatcgctaactggcatatcaagtctagccagtattattttgagcctctttatgacttgcttcgtgacatcttattaagtcaagaggtcattcatgcggatgagacatcttatagagttcttgaaagtgacactcagttgacctattactggacttttttgtctggtaagcatgagaaaaaagggattaccctttaccatcatgataaaaggcgtagcggcctcgttactcaagaggttctcggcgattactcaggttatgtgcattgtgatatgcatggggcttatcgtcaattagagcatgccaagcttgttggttgttgggcacatgtgaggcggaagttctttgaggccaccccgaagcaagctgataagacttctctagggcgtaaaggacttgtttactgtgacaagttgttcgccttagaagctgaatggtgtgagttaccccctcaagagcgtctggttaaacgcaaagaaatcttgacgccattaatgaccaccttctttgattggtgtcgcgagcaagttgtcctttcaggatcgaagctgggtctcgctatcgcttatagtctcaagcatgaaagaacctttagaactgttttagaggatggccatattgttctgtctaacaatatggcagagagagctatcaaatccttagtgatgggccgaaaaaattggttgttttctcaaagttttgaaggagccaaagcggcagctatcatcatgagtttgcttgaaacggctaagcgacatggactgaactccgaaaaatatattagctaccttctagaccgccttcctaatgaagaaactctcgctaaaagagaagtgctagaagcttatttgccatgggctaaaaaagtacaaacaaattgtcaataa

SEQ ID NO: 770 - protein, 450 aa, Streptococcus pyogenes
MTRTNYQKKRMTCPVETEDITYRRKKIKGRRQAILAQFEPELVHHELIGDSCTCPDCHGTLTEIGSVVQRQELVFIPAQLKRINHVQHAYKCQTCSDNSLSDKIIKAPVPKAPLAHSLGSASIIAHTVHQKFTLKVPNYRQEEDWNKLGLSISRKEIANWHIKSSQYYFEPLYDLLRDILLSQEVIHADETSYRVLESDTQLTYYWTFLSGKHEKKGITLYHHDKRRSGLVTQEVLGDYSGYVHCDMHGAYRQLEHAKLVGCWAHVRRKFFEATPKQADKTSLGRKGLVYCDKLFALEAEWCELPPQERLVKRKEILTPLMTTFFDWCREQVVLSGSKLGLAIAYSLKHERTFRTVLEDGHIVLSNNMAERAIKSLVMGRKNWLFSQSFEGAKAAAIIMSLLETAKRHGLNSEKYISYLLDRLPNEETLAKREVLEAYLPWAKKVQTNCQ

SEQ ID NO: 771 - DNA, 1377 bp, Streptococcus pyogenes
atggatcgctatattgatggctttatgaaatggatgccagaatcgctttttatctgttttattttaacctttttagtcgttactatgtctgtgttgatgacggatagtccctttattggtacggaaaagacgggcgggattatctatggctgggtaaatggtttttgggggctgttgtcctttgccatgcagatgactattttacttgcgacagggaatgctgtagcgagttctccacctgctcataagatgtttaagtcccttgccaaactgcctcaaaccaggactcagatttttatcttttccattgtagtaggctctatctttggctttttacactggggtcttggtatgatggttgctattgtgtttgggaaagagttgcttgttcaggctaggcaaaaagggattaaggtgcatacgcctttgtttgttgctactttattttttacctttttaccagctacttctggtctatctggtgctgcggtgctttattcggctactccagattatttgcgaaatagtgtcgcagatgcttataaacaggttgttcctgaaagtgttcctctgacagaatcagttttgaatcttccatttatcagtcttttagtggtgtgtatgctggtaccgctttgctttgctttattggcgcacccaaaagatgaaactaaaatcatggaacttgatgatgagatctatcaccatagtcttgataccgcttcacatgttgttattgcaagaaacacacctgctgaaaagatgaacgcatctcgcttagtgatgtatcttgttggtggggccattgttagctatagcctttatcatttttcggtggtgggcttgtctggtctagatctcaattgttttaactttttatttttaggcttaggcttgcttctttgtggtcaacaaggaccagaatattatggttccttattcaaagatggggtcatgtcatcttggggcttggtgcttcagtttccattttacgctggtatttttggaatcattcaaagtacaggtttaggattagagatttcccatttctttgtcgctatttcaaatgggacaacatggccggtctttgcttatctttactcggctttgctgaatattgcggtaccatcaggaggctcaaaatttgtgattgaagctccctatatcgtccctgcaactatcgaagttggtaatgacttaggtaagattttgcaggcttatcaattaggagatgccacaacaaacttgatagttcctttttgggccttatcttacctctcaaacttcaaactaaaattcaatcaaattgtggcttatactattccttgtgtcttggtggtcacaggtattgccatcatttacctatttgtattttag

SEQ ID NO: 772 - protein, 458 aa, Streptococcus pyogenes
MDRYIDGFMKWMPESLFICFILTFLVVTMSVLMTDSPFIGTEKTGGIIYGWVNGFWGLLSFAMQMTILLATGNAVASSPPAHKMFKSLAKLPQTRTQIFIFSIVVGSIFGFLHWGLGMMVAIVFGKELLVQARQKGIKVHTPLFVATLFFTFLPATSGLSGAAVLYSATPDYLRNSVADAYKQVVPESVPLTESVLNLPFISLLVVCMLVPLCFALLAHPKDETKIMELDDEIYHHSLDTASHVVIARNTPAEKMNASRLVMYLVGGAIVSYSLYHFSVVGLSGLDLNCFNFLFLGLGLLLCGQQGPEYYGSLFKDGVMSSWGLVLQFPFYAGIFGIIQSTGLGLEISHFFVAISNGTTWPVFAYLYSALLNIAVPSGGSKFVIEAPYIVPATIEVGNDLGKILQAYQLGDATTNLIVPFWALSYLSNFKLKFNQIVAYTIPCVLVVTGIAIIYLFVF

SEQ ID NO: 773 - DNA, 660 bp, Streptococcus pyogenes
atgaaagagaataaaagaatagcaatagcagaagctatcagtcatattaaagatggtgacacgattatggtcggtggttttatggctaatggaacaccagaagcgttaattgatgcactggttgacaaaggcacaaaagacttaaccttgatctgtaatgatgctggttttgttgatcgcggtgttggaaaaatggtggctaatcatcaattcaaaaccatttatgcaacacatattggattaaataaagaagctgggcgccaaatgactgccggtgaaacgacgattgagctcattcctcaaggaaccttcgccgaaaaaattcgcatcggagcttatggcattggtggcttttacacgccaacaggggtaggaaccttagtggcagaaggcaaggaaacaaaaaccatcaagggaaaaacctatctcttagaatacccatttgaggcagatgtcgccttgatatttgctaatcaagctgatgaaatgggaaatttacagtatagtggttctgaaaataattttaatcaattgatggcagcttgtgcaaaaacaacaattgttcaggcgcgagaaatagtaccagtcggcaccatacaaccagaatgcgttcatacaccacatatttttgtagattacattgttaaagaaggagtatag

SEQ ID NO: 774 - protein, 219 aa, Streptococcus pyogenes
MKENKRIAIAEAISHIKDGDTIMVGGFMANGTPEALIDALVDKGTKDLTLICNDAGFVDRGVGKMVANHQFKTIYATHIGLNKEAGRQMTAGETTIELIPQGTFAEKIRIGAYGIGGFYTPTGVGTLVAEGKETKTIKGKTYLLEYPFEADVALIFANQADEMGNLQYSGSENNFNQLMAACAKTTIVQAREIVPVGTIQPECVHTPHIFVDYIVKEGV

SEQ ID NO: 775 - DNA, 321 bp, Streptococcus pyogenes
atgaataccctattgtcactaatgaatagtatcgaacaagaggctagaacaatttatgacagttacgatgctaagaaaaaagctctagctgacaaaaaagaagaagagttaaagcagctgttccttgagtacgaacaagaaactcagctactattagaagctaaacgtgaggtgttttttgaagctaatcgtcaagaacaaaaagcttcaaaaaagagattagcgacgcaacagctagcccttcatgccattttagaagagcataagctaaccgttgttagggagttagtggataaggtggtggagacatatggccattag

SEQ ID NO: 776 - protein, 106 aa, Streptococcus pyogenes
MNTLLSLMNSIEQEARTIYDSYDAKKKALADKKEEELKQLFLEYEQETQLLLEAKREVFFEANRQEQKASKKRLATQQLALHAILEEHKLTVVRELVDKVVETYGH

SEQ ID NO: 777 - DNA, 480 bp, Streptococcus pyogenes
atggaacatttagcacattattttacagcacatggtggcgttttcttcgcagccttaggaattgttttagccgtagctcttagtggcatgggctcagcttatggtgtcggtaaaggtggtcaagcggcagctgcgctcttaaaagaagaacccgaaaaatttacgtctgcgcttatcttgcaactgttacccggtagtcaaggaatctacggctttgctattggtattttaatttggatgaaactgacaccagaactttcagttaaccaaggattagcttactttttggtatctcttccaattgctattgttggttatttttcggccaagcaccaaggcaatgtttctgtagctggtatgcaaatcttggctaagcgccctaaagactttatgaaaggtgtcattttagcagctatggttgaaacctatgctattcttgcctttgtcgtctcctttattctcttaaataaaattggataa

SEQ ID NO: 778 - protein, 159 aa, Streptococcus pyogenes
MEHLAHYFTAHGGVFFAALGIVLAVALSGMGSAYGVGKGGQAAAALLKEEPEKFTSALILQLLPGSQGIYGFAIGILIWMKLTPELSVNQGLAYFLVSLPIAIVGYFSAKHQGNVSVAGMQILAKRPKDFMKGVILAAMVETYAILAFVVSFILLNKIG

SEQ ID NO: 779 - DNA, 627 bp, Streptococcus pyogenes
atggcacgattaaatgttaaaccaacacgcatggaacttagtaacttgaaaaatcgcttgaagacagctacaagaggtcataaattattaaaggacaagcgggatgagttgatgcgccgcttcgttgatttaattcgtgaaaacaatgagcttcggcaaactatcgaaaaagaacttgctgccaatatgaaggagtttgtcttggcaaaagcatccgaaaatagtctaatggtagaagaactctttgctgttccagtccatgaagtgaccttatggattgatattgaaaatatcatgagtgtcaatgtgcctaaattccatgtccagtctaatacggcaagagagcaagaacaaggtgagtttgcttatagttacctcagctcaaatagtgagatggacaatactatccaaaagacaaaagaactattagaaaagctcttacggttagctgaagttgaaaaaacttgtcaactaatggctgatgacattgaaaagactagacgtcgcgtcaatggcttagagtattctattatcccgcaactgaaagagacgattcactacattgagttgaaattagaagaggccgagcgtgcgagccttgttcgtattatgaaaataacatcataa

SEQ ID NO: 780 - protein, 208 aa, Streptococcus pyogenes
MARLNVKPTRMELSNLKNRLKTATRGHKLLKDKRDELMRRFVDLIRENNELRQTIEKELAANMKEFVLAKASENSLMVEELFAVPVHEVTLWIDIENIMSVNVPKFHVQSNTAREQEQGEFAYSYLSSNSEMDNTIQKTKELLEKLLRLAEVEKTCQLMADDIEKTRRRVNGLEYSIIPQLKETIHYIELKLEEAERASLVRIMKITS

SEQ ID NO: 781 - DNA, 1029 bp, Streptococcus pyogenes
atgtcacttggtcttgtttcgactgccctattcacattaggaggctgtaccaataactccgctaaacaaacaactgacaattcattaaaaatcgctatgattactaatcagacgggtattgatgacaagtcatttaaccagtcagcctgggaaggcttacaagcttggggaaaagaaaataaacttgaaaaaggaaaaggctatgattatttccaatcagccaatgaatcagagtttaccacaaaccttgagtcagcagtaaccaatggttataatcttgtttttgggattggatttccattacatgacgctgtagaaaaagtagccgcaaacaatcctgacaaccattttgcaattgtggatgatgtgattaaaggtcaaaaaaatgttgcaagtatcaccttttcagaccatgaagcggcatacctagccggtgttgcagcagctaaaacgacaaaaaccaagcaagttggttttgtaggtggtatggaaggagatgttgtcaagcgctttgaaaaaggttttgaagctggtgtgaaatcagtagatgataccatcaaagtaagagttgcttatgcaggctcttttgcagatgctgccaaaggcaagacgattgcagctgctcaatacgctgaaggcgcagatgttatttatcatgcagcaggaggcacaggggcgggtgtctttagcgaagctaagtctatcaacgaaaaacgtaaagaagaagataaggtttgggttattggtgttgaccgtgaccaaagtgaagatggaaaatacactacaaaagatggcaagtcagctaattttgttttgacctcaagtatcaaggaagtcggaaaagctttagtaaaagtagccgtaaaaacctcagaagaccaattcccaggtggtcaaataaccacttttggtttaaaagaaggtggtgttagccttacaacggatgctctgacacaagacactaaaaaagctattgaggctgctaaaaaagcgattatcgaaggaaccatcacagttcctgaaaactaa

SEQ ID NO: 782 - protein, 342 aa, Streptococcus pyogenes
MSLGLVSTALFTLGGCTNNSAKQTTDNSLKIAMITNQTGIDDKSFNQSAWEGLQAWGKENKLEKGKGYDYFQSANESEFTTNLESAVTNGYNLVFGIGFPLHDAVEKVAANNPDNHFAIVDDVIKGQKNVASITFSDHEAAYLAGVAAAKTTKTKQVGFVGGMEGDVVKRFEKGFEAGVKSVDDTIKVRVAYAGSFADAAKGKTIAAAQYAEGADVIYHAAGGTGAGVFSEAKSINEKRKEEDKVWVIGVDRDQSEDGKYTTKDGKSANFVLTSSIKEVGKALVKVAVKTSEDQFPGGQITTFGLKEGGVSLTTDALTQDTKKAIEAAKKAIIEGTITVPEN

SEQ ID NO: 783 - DNA, 540 bp, Streptococcus pyogenes
atgctagattcatttgataagggctggttcgtcctccaaacttactcaggctacgaaaacaaagtaaaagaaaacctcttgcaacgtgcccaaacctataacatgttggacaatattttgcgcgtcgaaattccgacacaaacggttaacgttgaaaaaaatgggcaaaccaaagaaatcgaagaaaatcgctttccagggtatgtcttggttgaaatggtcatgacagatgaagcttggtttgttgtgcgtaacacaccaaacgttacaggttttgtgggatcacacgggaaccgatcaaaaccaacaccacttcttgaagaagaaatccgtgctatcttgttgtctatgggtcaaaccattgatgtctttgataccaatatcaaagaaggcgatgtggttcagatcatagacggtgcctttatgggacaagaaggccgtgtggtagaaatcgaaaacaacaaagtgaaactgatgctcaacatgtttggctctgaaacagtagcagaagttgaactttatcaaattgcagaactatag

SEQ ID NO: 784 - protein, 179 aa, Streptococcus pyogenes
MLDSFDKGWFVLQTYSGYENKVKENLLQRAQTYNMLDNILRVEIPTQTVNVEKNGQTKEIEENRFPGYVLVEMVMTDEAWFVVRNTPNVTGFVGSHGNRSKPTPLLEEEIRAILLSMGQTIDVFDTNIKEGDVVQIIDGAFMGQEGRVVEIENNKVKLMLNMFGSETVAEVELYQIAEL

SEQ ID NO: 785 - DNA, 357 bp, Streptococcus pyogenes
atggaagatatttctgatccagaagttattttagagtatggggtttaccctgctttcataaaaggctatacccaattgaaagctaacatcgaagaagcattattagaaatgtcaaatagcggtcaagcattagacatttaccaagcagttcaaaccctaaacgctgaaaacatgttattaaattattacgaaagcttgccattttatttaaaccgtcaaagcatactagctaatatgaccaaagcgttaaaagatgcgcatattagagaggctatggcacattacaaattaggagaatttgctcactatcaagatactatgcttgatatggtcgaaagaacaataaaaacattttag

SEQ ID NO: 786 - protein, 118 aa, Streptococcus pyogenes
MEDISDPEVILEYGVYPAFIKGYTQLKANIEEALLEMSNSGQALDIYQAVQTLNAENMLLNYYESLPFYLNRQSILANMTKALKDAHIREAMAHYKLGEFAHYQDTMLDMVERTIKTF

SEQ ID NO: 787 - DNA, 1716 bp, Streptococcus pyogenes
atgtctaataaaaaaacatttaaaaaatacagtcgcgtcgctgggctactgacggcagctcttatcattggtaaccttgttactgctaatgctgaatcgaacaaacaaaacactgctagtacagaaaccacaacgacaaatgagcaaccaaagccagaaagtagtgagctaactactgaaaaagcaggtcagaaaacggatgatatgcttaactctaacgatatgattaagcttgctcccaaagaaatgccactagaatctgcagaaaaagaagaaaaaaagtcagaagacaaaaaaaagagcgaagaagatcacactgaagaaatcaatgacaagatttattcactaaattataatgagcttgaagtacttgctaaaaatggtgaaaccattgaaaattttgttcctaaagaaggcgttaagaaagctgataaatttattgtcattgaaagaaagaaaaaaaatatcaacactacaccagtcgatatttccattattgactctgtcactgataggacctatccagcagcccttcagctggctaataaaggttttaccgaaaacaaaccagacgcggtagtcaccaagcgaaacccacaaaaaatccatattgatttaccaggtatgggagacaaagcaacggttgaggtcaatgaccctacctatgccaatgtttcaacagctattgataatcttgttaaccaatggcatgataattattctggtggtaatacgcttcctgccagaacacaatatactgaatcaatggtatattctaagtcacagattgaagcagctctaaatgttaatagcaaaatcttagatggtactttaggcattgatttcaagtcgatttcaaaaggtgaaaagaaggtgatgattgcagcatacaagcaaattttttacaccgtatcagcaaaccttcctaataatcctgcggatgtgtttgataaatcggtgacctttaaagagttgcaacgaaaaggtgtcagcaatgaagctccgccactctttgtgagtaacgtagcctatggtcgaactgtttttgtcaaactagaaacaagttctaaaagtaatgatgttgaagcggcctttagtgcagctctaaaaggaacagatgttaaaactaatggaaaatattctgatatcttagaaaatagctcatttacagctgtcgttttaggaggagatgctgcagagcacaataaggtagtcacaaaagactttgatgttattagaaacgttatcaaagacaatgctaccttcagtagaaaaaacccagcttatcctatttcatacaccagtgttttccttaaaaataataaaattgcgggtgtcaataacagaactgaatacgttgaaacaacatctaccgagtacactagtggaaaaattaacctgtctcatcaaggcgcgtatgttgctcaatatgaaatcctttgggatgaaatcaattatgatgacaaaggaaaagaagtgattacaaaacgacgttgggacaacaactggtatagtaagacatcaccatttagcacagttatcccactaggagctaattcacgaaatatccgtatcatggctagagagtgcactggcttagcttgggaatggtggcgaaaagtgatcgacgaaagagatgtgaaactgtctaaagaaatcaatgtcaatatctcaggatcaaccttgagcccatatggttcgattacttataagtag

SEQ ID NO: 788 - protein, 571 aa, Streptococcus pyogenes
MSNKKTFKKYSRVAGLLTAALIIGNLVTANAESNKQNTASTETTTTNEQPKPESSELTTEKAGQKTDDMLNSNDMIKLAPKEMPLESAEKEEKKSEDKKKSEEDHTEEINDKIYSLNYNELEVLAKNGETIENFVPKEGVKKADKFIVIERKKKNINTTPVDISIIDSVTDRTYPAALQLANKGFTENKPDAVVTKRNPQKIHIDLPGMGDKATVEVNDPTYANVSTAIDNLVNQWHDNYSGGNTLPARTQYTESMVYSKSQIEAALNVNSKILDGTLGIDFKSISKGEKKVMIAAYKQIFYTVSANLPNNPADVFDKSVTFKELQRKGVSNEAPPLFVSNVAYGRTVFVKLETSSKSNDVEAAFSAALKGTDVKTNGKYSDILENSSFTAVVLGGDAAEHNKVVTKDFDVIRNVIKDNATFSRKNPAYPISYTSVFLKNNKIAGVNNRTEYVETTSTEYTSGKINLSHQGAYVAQYEILWDEINYDDKGKEVITKRRWDNNWYSKTSPFSTVIPLGANSRNIRIMARECTGLAWEWWRKVIDERDVKLSKEINVNISGSTLSPYGSITYK

SEQ ID NO: 789 - DNA, 1140 bp, Streptococcus pyogenes
atgagagaaaatacgaccttattacatggctatacggttattgatgagtttacaggagcagcttcagttcccatctatcagacttcgacgttccacaattcagaactgtattgtcctagtcaaaaacatttgtacacacgcttttcaaacccaacgactgaagctttagaagacgggttagcctgtttagaaaaagcgacttatgcggtggcttatgcatctggtatggctgctatttcaactgttttgatgctcttaaaagctggagatcatgtgattttcccattggaggtctatggagggacttgccaatttgcgacagctattttacccaattatcagattgaaacaagctttgtagatatggctgatttagcaacagtaaaagcaagtatcaggcctaatacgcgtatgatttatctagagacaccgtcaaatccgctcttgaaaatttgtgatatttcagagcttgtgcaactcgccaaagcttatggtgtgctaactgtggctgataatacctttatgacaagtttgtatcaagaacccttagctatgggtgtggatattgtggtagaaagtgtgaccaaatttatcaatggtcatagtgatgtggtagctggtttagctgctaccaataatgaggctatctacaaccagctcaagctttttcaaaaaaactttggagcaattgttggggtcgaagacgcttggctgattcttcgtggcatgaaaactatggggatccgtatggaacaagcggtaaaaaatgctcagcagctcgctaactatttagcgaagcaccccaaagttcttaaggtacattaccctggcttagacagtcatcctaatcacgacacccacctgcaacaagctaagaatggtggtgctgttttatcctttgagttggcttctaaggaggagctgatgacctttacccatcgtattcagttgccgattttagccgttagtctaggtggagtagagtccattttgtcacatccagcaacgatgtctcatgcttgtttatcaccacaagcgcggttggaacaaggggttgttgatggtttgctgcgcttgtcttgtggtgttgaaaatatcgaagacttattagccgattttgagcaagcacttgctttttaa

SEQ ID NO: 790 - protein, 379 aa, Streptococcus pyogenes
MRENTTLLHGYTVIDEFTGAASVPIYQTSTFHNSELYCPSQKHLYTRFSNPTTEALEDGLACLEKATYAVAYASGMAAISTVLMLLKAGDHVIFPLEVYGGTCQFATAILPNYQIETSFVDMADLATVKASIRPNTRMIYLETPSNPLLKICDISELVQLAKAYGVLTVADNTFMTSLYQEPLAMGVDIVVESVTKFINGHSDVVAGLAATNNEAIYNQLKLFQKNFGAIVGVEDAWLILRGMKTMGIRMEQAVKNAQQLANYLAKHPKVLKVHYPGLDSHPNHDTHLQQAKNGGAVLSFELASKEELMTFTHRIQLPILAVSLGGVESILSHPATMSHACLSPQARLEQGVVDGLLRLSCGVENIEDLLADFEQALAF

SEQ ID NO: 791 - DNA, 1428 bp, Streptococcus pyogenes
atgctcctagctcccctaaactggttctcgcaaaatattttgcaaaacccagcgttctttgtaggtcttttggttttaatcgggtatttactccttaaaaaacccatttatgaggtctttgctggttttgtaaaggctaccgttggttacttgattttgaacgttggagcaggcggtcttgtaacgacttttcgtccgatcttggttgctcttgccaagaaatttgaattgaaagccgccgttattgatccttattttggtttggctgctgctaatactaagttagaagagatgggcttcatcagtgttgctacgacagctctcttgattggatttggggtcaacattcttttggttgcacttcgcaaggtcactaaagttcgtacccttttcatcacaggtcacatcatggtccaacaggcagcgacgatttcggtctttgtccttcttttaatccctcaattccaaaatgcttttggggcatgggcagtcggtatcatctgtgggctttactgggctatcagctcaaacatgaccgttgaagcaactcaacgccttacaggtggcggtgggtttgcgattggtcaccaacaacaatttgcgatttggtttgtggataaggttgcaccgttctttggtaaaaaagaagaaaaccttgataacctaaaattaccgaccttcttaaacattttccatgatactgttgttgcgtcagcaactttgatgttggtctttttcggagctatcttggctgtccttggtccagacattatgtctgatgtggacttaatcggacctggagcattcaacccagctaagcaagctttcttcatgtatattttgcaaacctctctcaccttctcagtttatctctttatcttgatgcagggtgttcgcatgtttgtttctgaattgaccaatgcttttcaagggatctcaagcaaattgcttccagggtcattcccagcggttgacgttgcagcttcctatggctttggttcttcaaatgcggtgctttcaggatttgcctttggtttgattggtcaattaatcaccattgctcttcttgttatctttaaaaatccaatcttaattatcacaggattcgttcccgtattctttgataatgcggcaattgcggtttatgcagataaacgtggtggctggaaagcagcggtagctctatcatttatctcaggtattttgcaagttgcacttggtgctgttgctgtaggtcttttaggacttacaggtggttatcacggtaatatcgacttggttcttccatggttaccatttgggtacctcttcaaattccttggtattgcagggtatgtgcttgtttgcatcttcttacttgccattccacaattgcaattcgcaaaagctaaggacaaagaagcttactaccgtggggaagctcaataa

SEQ ID NO: 792 - protein, 475 aa, Streptococcus pyogenes
MLLAPLNWFSQNILQNPAFFVGLLVLIGYLLLKKPIYEVFAGFVKATVGYLILNVGAGGLVTTFRPILVALAKKFELKAAVIDPYFGLAAANTKLEEMGFISVATTALLIGFGVNILLVALRKVTKVRTLFITGHIMVQQAATISVFVLLLIPQFQNAFGAWAVGIICGLYWAISSNMTVEATQRLTGGGGFAIGHQQQFAIWFVDKVAPFFGKKEENLDNLKLPTFLNIFHDTVVASATLMLVFFGAILAVLGPDIMSDVDLIGPGAFNPAKQAFFMYILQTSLTFSVYLFILMQGVRMFVSELTNAFQGISSKLLPGSFPAVDVAASYGFGSSNAVLSGFAFGLIGQLITIALLVIFKNPILIITGFVPVFFDNAAIAVYADKRGGWKAAVALSFISGILQVALGAVAVGLLGLTGGYHGNIDLVLPWLPFGYLFKFLGIAGYVLVCIFLLAIPQLQFAKAKDKEAYYRGEAQ

SEQ ID NO: 793 - DNA, 864 bp, Streptococcus pyogenes
atggcgcgtcctattggtatttatgaaaaagcaacgccaaaacagtttacctggcgtgaacgcttgcaatttgcaaaagacttaggttttgattttgtggaaatgtctgttgatgaatcagatgctcgcttagcgcgcttagagtggactaaggaagaacggcttgatttagtgaaagccatttatgaaacaggcattcgcatcccgaccatttgtttttctggtcatagacgttacccactaggctcaaatgatcctgctattgaagctaagtcccttaaactgatgaaacaatgtattgaattggcacaggacttaggcgttcgtaccattcaattagctggttatgacgtttactatgaaaaaaaatcgcctgaaacccgtgctcgttttatcaaaaacttgagacaatcttgtgactgggccgaagaagcccaagtgatgctttctattgagattatggatgacccttttatcaactctattgagaaatacttggcagttgaaaaagagattgactcgccttatctctttgtttatcctgatgcaggcaatgtttctgcttggcataatgatttgtggagtgaattttacaatgggcacaaatccattgcagccctccacttgaaagatacttatgctgtcacggaaacctcaaaagggcagtttcgtgatgtgccatttggtcaaggttgtgtggactggcaagagctgtttgcggtcctcaagaaaaccaactacaatgggccttttttgattgaaatgtggtcagaaaattgtgacacggtggaggaaacaaaagctgctatcaaagaagctcaggacttcctttacccacttattgagaaagcggggttgacataa

SEQ ID NO: 794 - protein, 287 aa, Streptococcus pyogenes
MARPIGIYEKATPKQFTWRERLQFAKDLGFDFVEMSVDESDARLARLEWTKEERLDLVKAIYETGIRIPTICFSGHRRYPLGSNDPAIEAKSLKLMKQCIELAQDLGVRTIQLAGYDVYYEKKSPETRARFIKNLRQSCDWAEEAQVMLSIEIMDDPFINSIEKYLAVEKEIDSPYLFVYPDAGNVSAWHNDLWSEFYNGHKSIAALHLKDTYAVTETSKGQFRDVPFGQGCVDWQELFAVLKKTNYNGPFLIEMWSENCDTVEETKAAIKEAQDFLYPLIEKAGLT

SEQ ID NO: 795 - DNA, 1644 bp, Streptococcus pyogenes
atgattttagataaaaagagttatgacttgctgtcttatttacttaaactagaaacacctgagacagttatggccatttctcatgctttaaatcagtcacgtcgtaaagtttattaccagcttgacaaaattaatcaggctttgccaaagggagtagatcagattatctcttatcctagacttggcattcttttaacggcggatcaaaaagctgcttgtcgcttattattagaagaagtgactgattataattatgtcatgaaaagtgatgagcgcagacgactatcctcgatttatattgcggtttccactgagcgcgtgaccattgataaactgatgcagatcaatgatgtgtctcgtaacacgattttaaatgacctgactgagttaagggaagaactggaagacaaacaatacaagattcagcttcatgcgacaaaggctaggggatattattttggttgtcatccaatggctcttattcaatacctgtacaaattgttagtggacgtttaccaaggtggcaatactagctttattgatatattcaaccgtaaactctcagagatacaaggcttatcggtttatttttctaaagatattttgacctattttcatgagtatctttttttatctcaagctagtttaggaaagacaattaatacccaagatagccaattcatgttgcagattttacctttcatgcttttaagttatcgtaatatgcgtcttgattcagaaacaaagtctgctcttaaacaagaatttcatttgatttggaaacgtaaagaatatcacattgctcaggacttagctagagagctttaccataattttaagcttcatttggatgatatcgaagttagtatggtagcgatgttgatgttgtcttttcgaaaagatcaagatcatcacgtggaaagtcaagattacgatgacatgcgagcaaccattagtcactttattgaccagttggagagccgttatcagttacatttcacgcataaacaggatttgctgaagcggttgacgacccattgtaaggcgctcgtttaccgtaaagcttatgggatttttttagttaatcccttaacagaccatgttaaagaaaaatacgaagaattgtttgctatgactcaatcttgtgccactattttggaacaagattggacgattagcttgacagacgatgatattgcctacttgactatccatcttgggggagagctgcgtcacaataatacagagcaagaaaagaccaaactcgttattgtttcagatgatgggataggcattcaaaagttattgttcaaacagtgtcaaaggtatctagcaaatggtcagattgaagctgtttttacgacagaacagtatcagagtgtttacgatcttttagcagtcgatatgattgttgctactacagatacgctaaagactaaaatcccgatgcttattgttaaccctattttaagtgacgatgatatcatcaaattgatacgcttttcaaagcaaggacgcttgagtgagcactcccgcttttctacagagctcacaaaagcaattgaagctgttgtaaaagatgaatcagatcgttatgccttggtttctaaaattgaaaaactcattcatcgcgagctgctatga

SEQ ID NO: 796 - protein, 547 aa, Streptococcus pyogenes
MILDKKSYDLLSYLLKLETPETVMAISHALNQSRRKVYYQLDKINQALPKGVDQIISYPRLGILLTADQKAACRLLLEEVTDYNYVMKSDERRRLSSIYIAVSTERVTIDKLMQINDVSRNTILNDLTELREELEDKQYKIQLHATKARGYYFGCHPMALIQYLYKLLVDVYQGGNTSFIDIFNRKLSEIQGLSVYFSKDILTYFHEYLFLSQASLGKTINTQDSQFMLQILPFMLLSYRNMRLDSETKSALKQEFHLIWKRKEYHIAQDLARELYHNFKLHLDDIEVSMVAMLMLSFRKDQDHHVESQDYDDMRATISHFIDQLESRYQLHFTHKQDLLKRLTTHCKALVYRKAYGIFLVNPLTDHVKEKYEELFAMTQSCATILEQDWTISLTDDDIAYLTIHLGGELRHNNTEQEKTKLVIVSDDGIGIQKLLFKQCQRYLANGQIEAVFTTEQYQSVYDLLAVDMIVATTDTLKTKIPMLIVNPILSDDDIIKLIRFSKQGRLSEHSRFSTELTKAIEAVVKDESDRYALVSKIEKLIHRELL

SEQ ID NO: 797 - DNA, 873 bp, Streptococcus pyogenes
atgtcaatcatttcaactgatttaaccccttttcaaatagatgatacattgaaagcagccttgcgagaagatgttcattccgaagattacagtaccaatgccatttttgatcatcatggccaagccaaggtgtcgctttttgccaaggaagctggtgttttagcggggctaaccgtttttcaaagggtttttaccctatttgatactgaggtgaccttccagaatcctcatcaatttaaggatggggatcgtttgactagtggcgatttggttttagaaatcataggctcggtgagaagcctcttaacatgtgaacgcgttgccttgaattttttacaacatttatcagggattgcttcgatgacagctgcttatgtagaagccttaggcgatgatcgcattaaggtatttgatactcgaaaaaccactcctaatttacgtctttttgagaaatatgccgtgagagttggcggtggctataatcatcgctttaatttatcagatgctatcatgctaaaagacaatcacattgcggcagtaggtagtgttcaaaaggcgattgctcaagcgcgtgcctatgccccttttgtgaaaatggtcgaggtggaagtggaaagccttgctgctgccgaagaagctgcggcggcgggtgttgatattatcatgttggataatatgtcattggaacagattgaacaggccattactctaattgcaggacgttctcggattgaatgttctggaaatattgatatgaccactattagccgttttcgtggtttagcgattgattacgtctccagtggtagtttaacccatagtgctaagagtctcgatttttccatgaagggtttaacctaccttgatgtctaa

SEQ ID NO: 798 - protein, 290 aa, Streptococcus pyogenes
MSIISTDLTPFQIDDTLKAALREDVHSEDYSTNAIFDHHGQAKVSLFAKEAGVLAGLTVFQRVFTLFDTEVTFQNPHQFKDGDRLTSGDLVLEIIGSVRSLLTCERVALNFLQHLSGIASMTAAYVEALGDDRIKVFDTRKTTPNLRLFEKYAVRVGGGYNHRFNLSDAIMLKDNHIAAVGSVQKAIAQARAYAPFVKMVEVEVESLAAAEEAAAAGVDIIMLDNMSLEQIEQAITLIAGRSRIECSGNIDMTTISRFRGLAIDYVSSGSLTHSAKSLDFSMKGLTYLDV

SEQ ID NO: 799 - DNA, 105 bp, Streptococcus pyogenes
atgattgatttaaaaaggaatcttttcaaaattgatgtccgggcacaaaaggatgaagagaaagttttcatgcgtacggcgtggctagtttcttgtcagccttga

SEQ ID NO: 800 - protein, 34 aa, Streptococcus pyogenes
MIDLKRNLFKIDVRAQKDEEKVFMRTAWLVSCQP

SEQ ID NO: 801 - DNA, 900 bp, Streptococcus pyogenes
atgaccaaagtcagaaaagctattattcccgcagcaggtttaggcacacgttttttacctgcaaccaaggcccttgccaaggagatgctacctattgttgataaaccaactattcaatttatcgttgaagaagctctaaaatcaggtatcgaagaaattcttatcgttactggaaaatccaaacgctccatagaagatcattttgattctaattttgaattagaatataatttacaggctaaaggaaaaatcgaacttctaaagttagtagacgagaccacttctattaatcttcactttattcgacagagtcatccaagaggattaggagacgcagttcttcaagcaaagacctttgttggcaatgaaccttttgttgtcatgctaggtgatgatctgatggatattacaaatccaaatgtaaaaccattaaccaaacaattgatcgatgactatgaagaaactcatgctgcaactattgccgtcatgagggttcctcacgaggatgtctctaactacggtatcattgctcctcaagcaaaagcagtaaaaggactctatagtgtggatacttttgttgaaaaaccacaacctcaagatgcacctagtgatttggcaattattggacgttacttgctcacaccagaaatttttagtattttagaaaaacaagaacctggtgcaggcaatgaagttcaactgactgatgctattgataccctcaataagacacagcgtgtctttgctcgtgagtttaaagggaaacgctatgatgttggcgataaatttgggtttatgaaaacttctttggattatgccctgaaacaccctcaagtcaaagatgacttgaaagcctacatcatccaactgggcaaagcactagagaagacaaaaccataa

SEQ ID NO: 802 - protein, 299 aa, Streptococcus pyogenes
MTKVRKAIIPAAGLGTRFLPATKALAKEMLPIVDKPTIQFIVEEALKSGIEEILIVTGKSKRSIEDHFDSNFELEYNLQAKGKIELLKLVDETTSINLHFIRQSHPRGLGDAVLQAKTFVGNEPFVVMLGDDLMDITNPNVKPLTKQLIDDYEETHAATIAVMRVPHEDVSNYGIIAPQAKAVKGLYSVDTFVEKPQPQDAPSDLAIIGRYLLTPEIFSILEKQEPGAGNEVQLTDAIDTLNKTQRVFAREFKGKRYDVGDKFGFMKTSLDYALKHPQVKDDLKAYIIQLGKALEKTKP

SEQ ID NO: 803 - DNA, 234 bp, Streptococcus pyogenes
atggtcaaaaatgggtttatcaatgtgatgccttcccaagtggataagcgttataagcaagtagtgttagcgcaggttggtagagataaattgcctttgttgcgagagtgtcgtaaggatatcgagcactattttttaaaagaaattacaaaagaagagttgctgacagcgaaaaaagtaattgaacagctcaagcaaaatatgctaacttataaaggagacaacgatgcttaa

SEQ ID NO: 804 - protein, 77 aa, Streptococcus pyogenes
MVKNGFINVMPSQVDKRYKQVVLAQVGRDKLPLLRECRKDIEHYFLKEITKEELLTAKKVIEQLKQNMLTYKGDNDA

SEQ ID NO: 805 - DNA, 1785 bp, Streptococcus pyogenes
atgaaaacagcacgttttttctggttttattttaaacgctatcgtttctcatttactgtcattgctgttgccgttatcttagcaacttatttacaagtaaaagctcctgtcttcttaggagagtccttgactgagttgggaaaaatcggtcaggcttattacgttgctaagatgagtggccagacacattttagccctgatttatcagcttttaatgccgtgatgtttaagcttttgatgacttatttctttactgttttagctaatctaatatatagtttcttacttacacgtgttgtctcacattcgactaaccgcatgcgcaagggcttatttggtaaattagaacgtttaaccgtcgccttttttgaccgccataaagatggggagattctttctcgtttcacgagtgatttggataatattcaaaactcgctgaaccaatccttgattcaagtggtgactaatattgccctttacatcggcctggtctggatgatgtttaggcaagatagccgtttagctttgttaaccatcgcatcaaccccagttgctctcatttttttagtgattaacatccgtttggcaagaaaatacaccaatatccaacagcaagaagtcagtgctttaaatgcttttatggatgaaaccatttcaggacaaaaggctattattgtacaaggtgtccaagaagatacgatgacagcctttttaaagcataatgaaagggttcgacaagccaccttcaaacgccgtctgttctcaggacaattatttccagtcatgaatggaatgagccttattaacacggctatcgtgatttttgtcggttcaacaattgtcctcagtgacaaatctatgccagcagcggcagcgcttggtttagtggttacttttgtacaatattcccagcaatattaccaacccatgatgcaaatcgcgtctagttggggagaattgcagctggcctttaccggtgctcaccgtattcaagaaatgtttgatgaaaccgaagaagttcgtccacaaaatgcaccagcgttcaccagcttaaaagaagcagtggcgattaaccacgtcgattttgggtatcttcctgggcaaaaagttttatcagatgtgtcaatcgttgcacccaagggcaaaatgattgccgtggttggaccgacaggttctggaaagaccactattatgaacttgattaaccgtttctacgatgtggatgcaggttcgattacctttgatggccgtgatattcgtgactacgatttggatagtcttcgtcaaaaggtagggattgtgttgcaagagtcagttcttttttcaggaaccattacggataatattcgttttggtgatcagaccattagtcaagacatggttgaaactgctgcgcgtgcgacccatattcatgactttatcatgtccttaccaaaagggtacaatacctatgtctcagatgatgacaatgtcttttcaacaggtcaaaagcagttgatttctattgctaggacgctactgactgaccctgaagtgttgattttggatgaggccacttcaaatgttgatacggttaccgaaagtaaaattcaacgggccatggaagctatcgtggcaggtcgaactagctttgtcattgctcaccgcctcaaaaccattttaaatgccgatcacattattgtgttgaaagatggcaaggtcattgagcaaggaaatcatcatgagctattgcatcaaaaaggcttttatgccgaattgtatcacaatcaatttgtctttgaatag

SEQ ID NO: 806 - protein, 594 aa, Streptococcus pyogenes
MKTARFFWFYFKRYRFSFTVIAVAVILATYLQVKAPVFLGESLTELGKIGQAYYVAKMSGQTHFSPDLSAFNAVMFKLLMTYFFTVLANLIYSFLLTRVVSHSTNRMRKGLFGKLERLTVAFFDRHKDGEILSRFTSDLDNIQNSLNQSLIQVVTNIALYIGLVWMMFRQDSRLALLTIASTPVALIFLVINIRLARKYTNIQQQEVSALNAFMDETISGQKAIIVQGVQEDTMTAFLKHNERVRQATFKRRLFSGQLFPVMNGMSLINTAIVIFVGSTIVLSDKSMPAAAALGLVVTFVQYSQQYYQPMMQIASSWGELQLAFTGAHRIQEMFDETEEVRPQNAPAFTSLKEAVAINHVDFGYLPGQKVLSDVSIVAPKGKMIAVVGPTGSGKTTIMNLINRFYDVDAGSITFDGRDIRDYDLDSLRQKVGIVLQESVLFSGTITDNIRFGDQTISQDMVETAARATHIHDFIMSLPKGYNTYVSDDDNVFSTGQKQLISIARTLLTDPEVLILDEATSNVDTVTESKIQRAMEAIVAGRTSFVIAHRLKTILNADHIIVLKDGKVIEQGNHHELLHQKGFYAELYHNQFVFE

SEQ ID NO: 807 - DNA, 768 bp, Streptococcus pyogenes
atgattgatttacaagagattctcgctaacatgaatcccaatcaaaagataaattatgacagggtcatgcaacagatggccaaggtttgggagaaggaatccgtgcgccccagtattttaatgcatgtctgctgcgccccatgctccacttacaccctagaatacctgacgcagtttgctgacattacggtttactttgccaattctaatattcaccctaaggacgaataccatcgcagagcttatgtgacacaacagtttgtctccgagttcaacgctaaaacaggcaatactgttcagtttctcgaagcggactatgtccccaatgagtacgttcgacaagtgcgaggcttagaagaggaaccagaaggtggggaccgttgccgtgtctgttttgattaccgactagacaagaccgctcaaaaagcagtggaacttggttttgactactttgccagtgccctaaccatcagtcctcataaaaattcgcaaaccattaatgatgtgggcatcgatgtgcaaaaggtttacaccaccaaatacctgccaagtgatttcaagaaaaacaacggttatcgcagatccgttgaaatgtgtgaggagtatgatatttaccgccaatgctattgtggctgtgtctatgctgccaaaatgcaaggtattgacttggttcaagtgaaaaaagatgccaaagcttttatggcagacaaggatttggataatgatttcacccacatccgctttagttatcgtggggatgagatgtga

SEQ ID NO: 808 - protein, 255 aa, Streptococcus pyogenes
MIDLQEILANMNPNQKINYDRVMQQMAKVWEKESVRPSILMHVCCAPCSTYTLEYLTQFADITVYFANSNIHPKDEYHRRAYVTQQFVSEFNAKTGNTVQFLEADYVPNEYVRQVRGLEEEPEGGDRCRVCFDYRLDKTAQKAVELGFDYFASALTISPHKNSQTINDVGIDVQKVYTTKYLPSDFKKNNGYRRSVEMCEEYDIYRQCYCGCVYAAKMQGIDLVQVKKDAKAFMADKDLDNDFTHIRFSYRGDEM

SEQ ID NO: 809 - DNA, 498 bp, Streptococcus pyogenes
atgtcttattttgaacattttatggctgccaatcaggcttatgtggccttgcatgggacagctcatttgcccttaaaacccaagactaaagtagcgattgtgacttgtatggattcacggctacatgtggcccaagctctggggctggctctaggagatgctcatattttaaggaatgctggcggacgtgtcaccgaagacatgattcggtcgctggttatttctcagcagcaaatgggaacgagagagattgtggttctccaccatacagattgtggcgcgcagacttttactaatgaaggctttgccaagcatattcatgagcacttaggtgtggatgtttcagggcaagatttccttcccttccaagatgtggaagacagtgtccgcgaggatatggctaagataagagcctcctctcttatctctgatgatgtcgttattaacggtgccgtctacgatgtggatactggaaagatgacacaagtaatggaatag

SEQ ID NO: 810 - protein, 165 aa, Streptococcus pyogenes
MSYFEHFMAANQAYVALHGTAHLPLKPKTKVAIVTCMDSRLHVAQALGLALGDAHILRNAGGRVTEDMIRSLVISQQQMGTREIVVLHHTDCGAQTFTNEGFAKHIHEHLGVDVSGQDFLPFQDVEDSVREDMAKIRASSLISDDVVINGAVYDVDTGKMTQVME

SEQ ID NO: 811 - DNA, 696 bp, Streptococcus pyogenes
atgagatttacgattgatcaaaacatgcaatttccactagttgagattgatctggaacatgggggatcagtttacttacaacaaggaagtatggtttatcatactgagaatgtaaccttgaataccaaattgaatggtaagggatctggtttaggaaaattagttggagccatcggccgttccatggtttctggtgaatcaatgttcattacacaagctatgtcaaatggagatggtaaattagcattagcacccaatacaccaggacagattgttgctttagaactaggtgaaaaacaatatcgtctaaatgatggtgcctttctagccctagatggttcagcacagtacaaaatggaacgtcaaaatattggaaaagcactttttggtggtcaaggcggactttttgtcatgacaactgaaggccttggtaccttacttgctaactcgtttggatctatcaagaaaatcacacttgatggtggcacaatgactattgataatgcccatgttgtagcatggagcagagaacttgattatgatattcatttagaaaatggctttatgcagtcaattggtacaggtgaaggagttgttaatacctttagaggtcatggtgagatttatatccaaagtcttaaccttgagcaatttgctgggactcttaaacgttatctaccaactagttcaaattag

SEQ ID NO: 812 - protein, 231 aa, Streptococcus pyogenes
MRFTIDQNMQFPLVEIDLEHGGSVYLQQGSMVYHTENVTLNTKLNGKGSGLGKLVGAIGRSMVSGESMFITQAMSNGDGKLALAPNTPGQIVALELGEKQYRLNDGAFLALDGSAQYKMERQNIGKALFGGQGGLFVMTTEGLGTLLANSFGSIKKITLDGGTMTIDNAHVVAWSRELDYDIHLENGFMQSIGTGEGVVNTFRGHGEIYIQSLNLEQFAGTLKRYLPTSSN

SEQ ID NO: 813 - DNA, 963 bp, Streptococcus pyogenes
atgcacatgtcaaatggtcactggaaagaagcttttctttttagaaaagttgaacagaaaaaagaggtatttcaagtgaacgtcaataaattaaaaatgagagagacgctcatctcatacgctttcttagctccggtcttggttttctttgtgatttttgtcttgataccgatgattatgggctttgtgacgagctttttcaattattccatgacagagtttacctttgttggttttgctaattatgctaggatgtttcaagatcccattttcatgaagtctcttattaacaccttgattattgttattggttcggtacctgttgtagttttcttttccctctttgtggcggctaaaacctacgacaaaaatgtagtggcgcgttcgttttaccgggcagttttctttctgcctgttgttaccggaagtgttgcggtgacggtggtttggaaatggatctatgatccaatgtcagggattttgaattatgtcttaaaatatgctcatgtgattgaacaaaatattagttggctgggagataagcactgggctttgttggctattattgttattttattaaccacatctgttgggcagcctattattctatatattgctgctatgggaaatattgataactctttggtagaagctgcgcgtgtggacggcgccacagaatttcaggtgttttggaatatcaagtggccaagtctgctgccaacaaccttatatattgctgtcataacaaccattaattccttccaatgttttgctttgattcaacttttgacgtctggagggccaaattattcaaccagtaccctcatgtactatttgtatgaaaaggcctttaagctctctgaatacggctatgccaacacaatgggtgtattcttggcagtcatgattgcaatcatcagctttgctcaatttaaaattttaggtaatgatgtggaatattag

SEQ ID NO: 814 - protein, 320 aa, Streptococcus pyogenes
MHMSNGHWKEAFLFRKVEQKKEVFQVNVNKLKMRETLISYAFLAPVLVFFVIFVLIPMIMGFVTSFFNYSMTEFTFVGFANYARMFQDPIFMKSLINTLIIVIGSVPVVVFFSLFVAAKTYDKNVVARSFYRAVFFLPVVTGSVAVTVVWKWIYDPMSGILNYVLKYAHVIEQNISWLGDKHWALLAIIVILLTTSVGQPIILYIAAMGNIDNSLVEAARVDGATEFQVFWNIKWPSLLPTTLYIAVITTINSFQCFALIQLLTSGGPNYSTSTLMYYLYEKAFKLSEYGYANTMGVFLAVMIAIISFAQFKILGNDVEY

SEQ ID NO: 815 - DNA, 825 bp, Streptococcus pyogenes
atgtggttaagatctttatgttataataacatcatgacaaataaagtagaaaaactaactatttttgatacccatacgcacctgaatgtagcagaatttcaaggacacgaaactgaagaattgactttggctcaagaaatgggcgtggcctaccataatgtggttggctttgaccaggccactattagtggggcactaactctagccaataaatatgccaatatttatgcaactattgggtggcatccaacagaagcaggttcttattcagaggctgttgaggaggctatcgtctctcaattatcacattccaaagtgattgccttaggtgaaattggcttagactattattggatggaggaccccaaagaggtgcaaatagaggtttttaagcgccaaatgcaattagcaaaagaccatgatttgccttttgtggtgcacacccgcgatgccttggaagatacctatgaggtcatcaaagcagctggtgttggccctcgtggaggcatcatgcattcttactcagggtcattagagatggctgaacgtttcattgaacttggcatgatgatttccttttcaggtgtggtcactttcaaaaaggctcttgatattcaagaggcagcgcagcacttgcctttggataagattttggtggaaacagatgccccttatcttacaccagttccaaaacgtggcaaacaaaatcatacagcttatacccgctatgtggttgataaaatcgcagagctacgggggatgactgtggaagaagttgcaaaagcaacgactgctaatgcaaagagggtattcaagcttgactga

SEQ ID NO: 816 - protein, 274 aa, Streptococcus pyogenes
MWLRSLCYNNIMTNKVEKLTIFDTHTHLNVAEFQGHETEELTLAQEMGVAYHNVVGFDQATISGALTLANKYANIYATIGWHPTEAGSYSEAVEEAIVSQLSHSKVIALGEIGLDYYWMEDPKEVQIEVFKRQMQLAKDHDLPFVVHTRDALEDTYEVIKAAGVGPRGGIMHSYSGSLEMAERFIELGMMISFSGVVTFKKALDIQEAAQHLPLDKILVETDAPYLTPVPKRGKQNHTAYTRYVVDKIAELRGMTVEEVAKATTANAKRVFKLD

SEQ ID NO: 817 - DNA, 873 bp, Streptococcus pyogenes
atgagaattgcagattatagcgtgaccaaggctgtccttgatcgtcacggatttacctttaagaaatcttttggtcagaactttttgaccgataccaatattttacagaaaatcgttgacacggctgagattgatcagaatgtcaatgttatcgagattggtcctggaattggggctttgacggaatttttggcagaaaatgctgctgaagtgatggcttttgagattgatgaccgcttggtgccgattttggcagataccttgcgcgattttgataatgtgcaagtggtcaatcaagatattttaaaagctgatttgcagacccaaatcaagcagtttaaaaatcctgatttgcccattaaggtggtggctaatctaccttactacatcacaacgcctattctcatgcacttgattgagagcaaaattccattccaagagtttgtggtcatgatgcagcgtgaagtggcagatcgtatttctgcggagccaaacactaaagcttatggttccttgtccattgcggtgcagtattacatgactgccaaggttgccttcattgtgccgcgcaccgtctttgtacctgcaccaaatgtcgatagtgctatcctcaaaatggtgcgtcgcgaccagcctttgattgaggttaaggacgaagatttctttttcagagtgtctcgtctcagttttgtccatcgtcgcaagaccctgtggaataacttgactagccattttgggaagtctgaagacatcaaggctaaacttgaaaaaggtctggcactagcagatatcaagccttctattcgtggtgaggccttgtcgattcaagattttggcaaattagctgatgctttaaaagaagttggattataa

SEQ ID NO: 818 - protein, 290 aa, Streptococcus pyogenes
MRIADYSVTKAVLDRHGFTFKKSFGQNFLTDTNILQKIVDTAEIDQNVNVIEIGPGIGALTEFLAENAAEVMAFEIDDRLVPILADTLRDFDNVQVVNQDILKADLQTQIKQFKNPDLPIKVVANLPYYITTPILMHLIESKIPFQEFVVMMQREVADRISAEPNTKAYGSLSIAVQYYMTAKVAFIVPRTVFVPAPNVDSAILKMVRRDQPLIEVKDEDFFFRVSRLSFVHRRKTLWNNLTSHFGKSEDIKAKLEKGLALADIKPSIRGEALSIQDFGKLADALKEVGL

SEQ ID NO: 819 - DNA, 741 bp, Streptococcus pyogenes
atgtctaactcaattattgaaatcaaaaatctcaaaaaatcttacggcagcaatgaagtactcaaagatatctccctttctgttaacaagggagaagtgatttccattatcggttcttctggttctggaaaatcaaccctcctgcgctcgatcaatcttttggaagagccaagtgccggtcaaatcctctttcatggtgaagatgtccttgctgaacactacaacttgactcactaccgtgaaaaactaggcatggttttccaatcctttaacttgtttgaaaacctaaatgtattggaaaatgctatcgtcgctcaaaccaccgtcctcaaaagagaccgtgcacaagccgaacaaatcgctaaagaaaacctcaatgcggttggtatgacagaacaatactggcaagccaaaccaaaacaattatcaggggggcaaaaacaacgggttgccattgccagagccttatctgtcaatccagaagccatgctctttgatgaaccaacatcagctcttgatcctgaaatggttggtgaggtccttaaaaccatgcaagacttggcaaaatcagggttgaccatgattattgttacccatgaaatggaatttgctcgtgatgtttctgaccgtatcatcttcatggataagggattgattactgaagaaggaagtcctcaacaaattttcgagaatcctacacaagatcgtaccaaagaatttttacaacgcttcttaaaataa

SEQ ID NO: 820 - protein, 246 aa, Streptococcus pyogenes
MSNSIIEIKNLKKSYGSNEVLKDISLSVNKGEVISIIGSSGSGKSTLLRSINLLEEPSAGQILFHGEDVLAEHYNLTHYREKLGMVFQSFNLFENLNVLENAIVAQTTVLKRDRAQAEQIAKENLNAVGMTEQYWQAKPKQLSGGQKQRVAIARALSVNPEAMLFDEPTSALDPEMVGEVLKTMQDLAKSGLTMIIVTHEMEFARDVSDRIIFMDKGLITEEGSPQQIFENPTQDRTKEFLQRFLK

SEQ ID NO: 821 - DNA, 1569 bp, Streptococcus pyogenes
atgaaaaagctaatccttagctgtttggtcgccttggcccttctgtttggaggaatgagccgggctcaagcaaaccaatatttaagagtcggaatggaagcagcctatgctccttttaactggactcaagatgacgcttcaaacggggctgttccaattgaaggaactagccaatacgccaacggttacgatgtccaagtcgctaaaaaagtcgctaaagctatgaacaaagaacttttagtcgttaagacctcttggaccggtttaattccagcattaacttctggaaaaatcgatatgatcgctgctggtatgagtcctaccaaagagcgtagaaacgaaattagcttctcaaacagctcctacactagccaacctgttctagtcgtaactgccaatggcaaatatgctgatgcaacaagcctcaaggatttttctggagctaaagtaactgcccagcaaggcgtttggcatgtcaatctcttaactcaactaaaaggtgctaagttacaaacaccaatgggagatttctctcaaatgcgacaagcccttacttcgggtgttatcgatgcctatatttctgaacgacctgaagccatgactgctgaagctgctgatagccgtttgaaaatgatcactcttaaaaaagggtttgctgttgctgaatcagatgctgctatcgctgtcggaatgaaaaaaaatgacgatcgtatggcaactgtcaaccaagtgcttgaaggattttctcaaacagatcgtatggccctgatggatgatatggttaccaaacaacccgtggaaaagaaagccgaagatgctaaagcatcatttctaggccaaatgtgggctatttttaaaggtaactggaagcaattcttacgtggaactggaatgacccttctgatttccatggtcggaaccattacaggtctctttattggattattaatcggtattttccgtacagctcctaaagctaagcataaagtagctgccttgggacaaaaactctttggttggttactcactatttatatcgaaatcttccgtgggacacctatgattgttcaatctatggttatctactacggaacagcgcaagcctttggtatttcgatcgaccgtaccctagcggctatttttatcgtatctatcaatacgggggcctatatgagtgaaattgttcgcgggggtattttcgctgtcgacaaaggtcaattcaaagcagcaactgctcttggctttactcacggacaaaccatgcgtaaaatcgtgctaccacaagttgttcgcaacattttaccagcaacaggtaatgagtttgtcatcaatatcaaagatacttctgtcttgaatgttatctctgttgtggaactttacttctcaggtaataccgtagccacacaaacctaccaatatttccaaacctttacgattatcgccattatctactttgttcttaccttcacggtgacacgtatccttcgttatattgaacgccgtttcgatgccgatacttacaccactggagcaaaccaaatgcagattgcggaggtctcaaatgtctaa

SEQ ID NO: 822 - protein, 522 aa, Streptococcus pyogenes
MKKLILSCLVALALLFGGMSRAQANQYLRVGMEAAYAPFNWTQDDASNGAVPIEGTSQYANGYDVQVAKKVAKAMNKELLVVKTSWTGLIPALTSGKIDMIAAGMSPTKERRNEISFSNSSYTSQPVLVVTANGKYADATSLKDFSGAKVTAQQGVWHVNLLTQLKGAKLQTPMGDFSQMRQALTSGVIDAYISERPEAMTAEAADSRLKMITLKKGFAVAESDAAIAVGMKKNDDRMATVNQVLEGFSQTDRMALMDDMVTKQPVEKKAEDAKASFLGQMWAIFKGNWKQFLRGTGMTLLISMVGTITGLFIGLLIGIFRTAPKAKHKVAALGQKLFGWLLTIYIEIFRGTPMIVQSMVIYYGTAQAFGISIDRTLAAIFIVSINTGAYMSEIVRGGIFAVDKGQFKAATALGFTHGQTMRKIVLPQVVRNILPATGNEFVINIKDTSVLNVISVVELYFSGNTVATQTYQYFQTFTIIAIIYFVLTFTVTRILRYIERRFDADTYTTGANQMQIAEVSNV

SEQ ID NO: 823 - DNA, 762 bp, Streptococcus pyogenes
atggaaatgaaacaaattagcgagacaacgctaaaaataacaattagtatggacgatttagaagaaagaggaatggagttgaaagatttcttgattcctcaagaaaaaacagaagagtttttctattctgtgatggacgaactcgatcttccagataattttaaagatagtggtatgcttagttttcgagtgactccacgcaaggaccgtctagatgtttttgttaccaaatctgagataaataaagatattaatcttgaagatttagcagagtttggtgatatgtcccaaatgactccggaagattttttcaagagcttggagcaatccatgcgtgaaaagggagatgtcaaagctcatgaaaaattggaaaaaattgaagagataatggaagatgttgttgaagccactctagctaatcagtctgaggcggctgatccatcaactaatcatgagtcagaacctttagactatgtccattatgtattggatttttcaacgattacagaggcagtggcttttgctaaaacgattgatttttcgatagaagcttcagagttatataaggggagcaactgctaccatatgactattttattagatgttcagcaacaaccatcttattttgcgaacgtcatgtatgcgagattgattgagcatgcaaaccctggatcaaaaacaagagcttatttacaagagcatggcttacaattgatgcttgatggtgctgttgagcaattacaaaagattgagttgggataa

SEQ ID NO: 824 - protein, 253 aa, Streptococcus pyogenes
MEMKQISETTLKITISMDDLEERGMELKDFLIPQEKTEEFFYSVMDELDLPDNFKDSGMLSFRVTPRKDRLDVFVTKSEINKDINLEDLAEFGDMSQMTPEDFFKSLEQSMREKGDVKAHEKLEKIEEIMEDVVEATLANQSEAADPSTNHESEPLDYVHYVLDFSTITEAVAFAKTIDFSIEASELYKGSNCYHMTILLDVQQQPSYFANVMYARLIEHANPGSKTRAYLQEHGLQLMLDGAVEQLQKIELG

SEQ ID NO: 825 - DNA, 1503 bp, Streptococcus pyogenes
atgaaaaaatatattttaaaccgtatcatgcgatcgttagtgtcggtagttctggtaacggctttaacatacaccatcgtatatactctagtacctaccagccttatctttaaacaagaccctaattataataaaatgacaacaacaccagataaaaaagtagcgtatgaaaatctaacttttcaacgtatgggttatgtcaattatttttcaagcaaagaattaaaagataatgcttctaaagtagatagtagtgtaacgacagaagcaactagtgctaacaaagctatctatgagaagtatattgattctcttggcaatggctggcagctaaaacgcttccccactagcaaacagttttatgcaattcgcaatattcctatttacgaacgtgtttggaactttttctcaaatctagttgttattgatcacccttggaagattcaggataaagataatccaaaattagctaggtatattcgtctagaaaaagataaatcagttggctggtcacttgttggttcggggacaaaacataagtatctcctctatactaacggaaaatttccttatcttcaccaaaactttgttaccttaaacttagggacatcttatccaacatacagcaatattcctgttcttcaggtcatttcacaagggcaaggacgaacagctcttcaagatgtgaccttcccatcaggtgtcactaagaaatcgtcagtggatatctatagccgtagctacaaaaatccaaaatcattggatgatatcaccaaggtaaactatggtaagggagattcctacactaaaaccatcaataattatgtcgacccatcaatgattcacaattcttttgtaattggtttttttggtgttatgttttcctatatcgttggtttgcctcttggtttatttatggctcggtttaaaaatacctattttgacagtttctcaacagcgaccatgaccttcatgcttgctttaccaagtattgctgttatctatgttgttcgcttcctaggtggcatggttggtttaccagatagtttcccaatgctgggggcatctgatcctaaatcttatattttaccagcccttattttaggaattttaaatattccaactacggttatctggttccgtcgctatcttgttgaccttcaggccagcgattgggtacgttttgcgcgttcaaaaggattatcagaatctgaaatttacagagggcatctcttcaaaaatgccatggtcccaattgtgtcaggggttcctgcaagtattatccttgctattggtggtgcaacattaacagagactgtctttgccttcccgggtatgggtaaaatgttaattgattctattaaatctgctaacaattctatgattgttggattaacctttatcttcactgtcttgtcaattgtttcacttttactaggagatattgtcatgacccttgtcgatccacgtattaaattgtcaacaaaaaaaggaggtaagtaa

SEQ ID NO: 826 - protein, 500 aa, Streptococcus pyogenes
MKKYILNRIMRSLVSVVLVTALTYTIVYTLVPTSLIFKQDPNYNKMTTTPDKKVAYENLTFQRMGYVNYFSSKELKDNASKVDSSVTTEATSANKAIYEKYIDSLGNGWQLKRFPTSKQFYAIRNIPIYERVWNFFSNLVVIDHPWKIQDKDNPKLARYIRLEKDKSVGWSLVGSGTKHKYLLYTNGKFPYLHQNFVTLNLGTSYPTYSNIPVLQVISQGQGRTALQDVTFPSGVTKKSSVDIYSRSYKNPKSLDDITKVNYGKGDSYTKTINNYVDPSMIHNSFVIGFFGVMFSYIVGLPLGLFMARFKNTYFDSFSTATMTFMLALPSIAVIYVVRFLGGMVGLPDSFPMLGASDPKSYILPALILGILNIPTTVIWFRRYLVDLQASDWVRFARSKGLSESEIYRGHLFKNAMVPIVSGVPASIILAIGGATLTETVFAFPGMGKMLIDSIKSANNSMIVGLTFIFTVLSIVSLLLGDIVMTLVDPRIKLSTKKGGK

SEQ ID NO: 827 - DNA, 1134 bp, Streptococcus pyogenes
atgattgattttattatttctattgatgattgcgcagttgaattggatagtcgtcaatcttggaaaattcgctcccccttatcaaccattctatttcttgtcttcgtttgtcagttagctggcattgaaacctggaaggagatggaagattttattgaaatgaatgaaccattgtttgcgacctacgttgatttgagtgaaggttgctcgtctcatgataccttagagcgtgtgattagtcttgttaattcagaccgtttaaaagagcttaaagttcaatttgagcaatcattgacaagcttagatgccgttcatcaactgatttcagtggacggtaaaacgattcgaggcaatcgaggtaaaaatcagaagcctgttcatattgtaacggcttatgatgggggtcatcatcttagtttgggacaggtagcggttgaggagaaaagtaatgaaattgttgccatccctcagctattgcggacaattgatatccgtaaaagcattgtaacgatagacgcaatgggcacgcagacggctatcgttgatacgattataaaaggtaaagcagactattgcttagccgtcaaaggaaatcaagaaacactttatgatgatattgctctttattttagtgatgtcaacttattggaagaactccaagaaaatgcgcagtattatcagactgttgaaaaatctaggggacagattgaagttagagaatactgggtgtcttccgatatcaaatggttgtgtcaaaaccatcccaaatggcataagttacgtggtattgggatgactcgtaacacgattgataaggatggtcagctgagtcaagagaatcgttattttatctttagctttaagccggatgtcctcacatttgccaattgtgtacgaggtcattggcagatagagagtatgcactggttattggacgttgtttatcatgaagatcatcatcagacattggataaaagagccgcatttaacctaaatcttatccgaaaaatgtgcttatattttctcaaagtgatggtatttcctaaaaaagacctcagttatcgtcgcaaacaacggtatatttctgtccatttggaagattatttagtccaattatttggagaaagaggttaa

SEQ ID NO: 828 - protein, 377 aa, Streptococcus pyogenes
MIDFIISIDDCAVELDSRQSWKIRSPLSTILFLVFVCQLAGIETWKEMEDFIEMNEPLFATYVDLSEGCSSHDTLERVISLVNSDRLKELKVQFEQSLTSLDAVHQLISVDGKTIRGNRGKNQKPVHIVTAYDGGHHLSLGQVAVEEKSNEIVAIPQLLRTIDIRKSIVTIDAMGTQTAIVDTIIKGKADYCLAVKGNQETLYDDIALYFSDVNLLEELQENAQYYQTVEKSRGQIEVREYWVSSDIKWLCQNHPKWHKLRGIGMTRNTIDKDGQLSQENRYFIFSFKPDVLTFANCVRGHWQIESMHWLLDVVYHEDHHQTLDKRAAFNLNLIRKMCLYFLKVMVFPKKDLSYRRKQRYISVHLEDYLVQLFGERG

SEQ ID NO: 829 - DNA, 378 bp, Streptococcus pyogenes
atggataatgatatgaggaataaaatgaaaaaagaagaactcttaaaaattgttgtggaagcaactgaggaaaagcgtgctaaagatattttagccttggatttagaggggttaactagtttgaccgattattttgtgattgcgagtgcaacaaacagtcgtcaattagaggctattgcggataatattcgtgaaaaggtaaaagaggctggtggagatgctagccatgttgaaggtaatagccaagcaggctgggtcttgcttgatttgaccgatgtggtggtacatctttttttagaagacgagcgttaccactataatcttgaaaaattgtggcatgaagcgcctgctgtggctctagatgcctatttagcttaa

SEQ ID NO: 830 - protein, 125 aa, Streptococcus pyogenes
MDNDMRNKMKKEELLKIVVEATEEKRAKDILALDLEGLTSLTDYFVIASATNSRQLEAIADNIREKVKEAGGDASHVEGNSQAGWVLLDLTDVVVHLFLEDERYHYNLEKLWHEAPAVALDAYLA

SEQ ID NO: 831 - DNA, 141 bp, Streptococcus pyogenes
atgcttaaaacgattttatatttctattttaccaaagcttttcaaagtgctataataagggagttagagtcaatattagtaacgttaatgttgacaatattcaataaaatactattaaaaggagacaaaaatgggacgtaa

SEQ ID NO: 832 - protein, 46 aa, Streptococcus pyogenes
MLKTILYFYFTKAFQSAIIRELESILVTLMLTIFNKILLKGDKNGT

SEQ ID NO: 833 - DNA, 846 bp, Streptococcus pyogenes
atgtcttttaaaaaatggattggaatagtcggaatcgctttagcatcaactgtattggttgcttgttctgaaaaacaagatgataaaaacactttaactattggggtgatgacaaaaacagaatctgatcaagcgagatgggataaagttgaagaattattgaaaaaagacaatatcactttgaagtacaaagaatttacagattactcgcaacctaataaggcagttgctaatggtgaagtcgatattaatgccttccaacactataatttcttaaataactggaataaggaaaataaggaacatttggtggccattgctgatacctatatcagcccaattaaccttttctctggaaccagtcaagatggaaaggctaaatacaaatcagtagctgatctgccaaatggtactcaaattgcagtaccaaatgatgcgaccaatgaaagccgtgccctctatgtgctgcaatcagctggcctcattaaattgaatgtgtctggtgatcaattagcaaccattgccaatatctcagagaacaaaaagaaattagatatcaaggaattagatgctagccaaacggcacgtgctttagtatctgctgatgcagctgttgtcaataatagttacgctgttcctgcaaaaattgactacaaaacctctcttttcaaagaaaaagcagatgacaattcaaaacagtggattaacattattgcaggtcaaaaagattgggaaaaatcagagaaggctgatgctattaaaaaactcatcaaggcctaccaaactgatgaggtgaagaaagtcgtggaaaaaacttcaaatggtatagatgtatccgtatggtaa

SEQ ID NO: 834 - protein, 281 aa, Streptococcus pyogenes
MSFKKWIGIVGIALASTVLVACSEKQDDKNTLTIGVMTKTESDQARWDKVEELLKKDNITLKYKEFTDYSQPNKAVANGEVDINAFQHYNFLNNWNKENKEHLVAIADTYISPINLFSGTSQDGKAKYKSVADLPNGTQIAVPNDATNESRALYVLQSAGLIKLNVSGDQLATIANISENKKKLDIKELDASQTARALVSADAAVVNNSYAVPAKIDYKTSLFKEKADDNSKQWINIIAGQKDWEKSEKADAIKKLIKAYQTDEVKKVVEKTSNGIDVSVW

SEQ ID NO: 835 - DNA, 279 bp, Streptococcus pyogenes
atgcaaaaagtacgtttaattgtttctggacgtgtacaaggtgttggttttcgatacgctacccatactttagctctagatataggagatatttatggtcgtgtctggaataacaacgatgggaccgttgaaattctggcccaatcaaaagattcagataaaatagccacatttattcaagaagttcgtaaaggaccatccaaatgggcaaaagtcacttatgtggatgtcaccatggctaattttgaagactttcaggactttcaaataggcaagtaa

SEQ ID NO: 836 - protein, 92 aa, Streptococcus pyogenes
MQKVRLIVSGRVQGVGFRYATHTLALDIGDIYGRVWNNNDGTVEILAQSKDSDKIATFIQEVRKGPSKWAKVTYVDVTMANFEDFQDFQIGK

SEQ ID NO: 837 - DNA, 987 bp, Streptococcus pyogenes
atgagtgaaaaaatttacgaatacaaagatgaaaataactggtttatcggaaagatgactggtcataatttaatatcgggctggggagtcaaacacacgacaatcaaaaaaatagatgaccttttagacggtattgccgcaacgttagattgggaaaatcctaaaggttacgatgtttcggtggtgcgtcatcagtctcctttatctctcatcacctttattatcgacatgataaatcaagagacccagcgtgagattaaggtaactccccatgcaggcacgattttattaatggaaaatgcgaaactgcttgcagtttatctcccagaaggtggagtttcaacggctacattttttgcgactagtgaacagggatttggggatattattttaatcgctacacgaaacgagggaaaaaccaaagagttccgcaatctgtttggccagctaggttatcgtgtggaaaatcttaatgattatccagaattgccagaagtagcagaaactggtactacttttgaagaaaatgctcgcttgaaagcagaaacgatttcacgcctcacaggaaaaatggtattagcagacgattcaggactaaaagttgatgccttgggtggtttacctggtgtttggtcagctcgtttctcaggaccagatgccacagatgccaagaataatgccaaactcttacacgaattagctatggtgtttgaccaaaagaagcgctcagctcaatttcatacgactttggtagtggctgctcccaataaagatagtttggttgtggaagccgattggccaggctatattgctacgcagcctaagggagaaaatggttttgggtatgatcctgtctttatcgtcggagagactgggcatcatgctgcagaattagaggctgaccaaaaaaatcagttgtcgcatagaggtcaagcagttcgaaaattaatggaggtctttccagcatggcaagcaaaacaatcatag

SEQ ID NO: 838 - protein, 328 aa, Streptococcus pyogenes
MSEKIYEYKDENNWFIGKMTGHNLISGWGVKHTTIKKIDDLLDGIAATLDWENPKGYDVSVVRHQSPLSLITFIIDMINQETQREIKVTPHAGTILLMENAKLLAVYLPEGGVSTATFFATSEQGFGDIILIATRNEGKTKEFRNLFGQLGYRVENLNDYPELPEVAETGTTFEENARLKAETISRLTGKMVLADDSGLKVDALGGLPGVWSARFSGPDATDAKNNAKLLHELAMVFDQKKRSAQFHTTLVVAAPNKDSLVVEADWPGYIATQPKGENGFGYDPVFIVGETGHHAAELEADQKNQLSHRGQAVRKLMEVFPAWQAKQS

SEQ ID NO: 839 - DNA, 723 bp, Streptococcus pyogenes
atgcgaattaacaaatacattgcccatgcgggtattgccagtcgtcgtaaggctgaagaattgattaagcaaggcttagtaaccttaaatggtcaggttattacggatttagcaaccactgtaaaatcgggagacgtggttgaaatagaaggaagtcctatttacaacgaggaaaaggtttactatttgcttaataaacctcgtggcgctatctcaagtgtgtcagatgacaaaggccgtaaaacggtactggatttactacctcaggttaaagaacgcatataccctgttggacgattggattgggacacatcaggggtccttattttaacgaatgatggtgattttacagatactatgattcatcctagaaatgaaatagacaaggtttatctggcgcgtgtcaaaggtattgcaacgaaagaaaatcttcgtcccttaactcgaggaattgttattgatggtaaaaagaccaaaccagctcgctacaatattgttcgtgtagaagctgataagagtcgatcgatcgtagaattgactatccatgaagggcgaaaccatcaagtgaaaaaaatgtttgagtctgtggggcttctggttgataaattatctcgtacacgttttgggaccgtcgacttaaagggactaagaccaggagaagcaagacgcttaaataaaaaagaaataagtcaactgcataacttagctaatacgaaaaaatga

SEQ ID NO: 840 - protein, 240 aa, Streptococcus pyogenes
MRINKYIAHAGIASRRKAEELIKQGLVTLNGQVITDLATTVKSGDVVEIEGSPIYNEEKVYYLLNKPRGAISSVSDDKGRKTVLDLLPQVKERIYPVGRLDWDTSGVLILTNDGDFTDTMIHPRNEIDKVYLARVKGIATKENLRPLTRGIVIDGKKTKPARYNIVRVEADKSRSIVELTIHEGRNHQVKKMFESVGLLVDKLSRTRFGTVDLKGLRPGEARRLNKKEISQLHNLANTKK

SEQ ID NO: 841 - DNA, 261 bp, Streptococcus pyogenes
atgaaaaaactattaatagtatctgttaaagcttatcaaaaatacatttctcctttatctcctcctagttgtcgctacaagccaacctgttcagcttatatgttaactgctattgaaaaacatggtactaagggaatattaatggggatagcaagaatattaagatgtcacccttttgttgctggtggtgtcgatcctgttccagaagattttagcctaatgagaaataaaaacacgtctaaaaacgctgaaaaggcatga

SEQ ID NO: 842 - protein, 86 aa, Streptococcus pyogenes
MKKLLIVSVKAYQKYISPLSPPSCRYKPTCSAYMLTAIEKHGTKGILMGIARILRCHPFVAGGVDPVPEDFSLMRNKNTSKNAEKA

SEQ ID NO: 843 - DNA, 549 bp, Streptococcus pyogenes
atgacgacaaaagaacttatcaacaaaaacgacaaagtaaaaaaggctcgcaatcatattgtcctgtttcaaccccaaattccacaaaatactggtaatattgctagaacatgtgctgcaactaatgcacctttacatattattaaacccatgggatttcctattgatgaccgcaaaatgaagcgtgcaggcttggattactgggacaagttagaactgcatttttatgatcatttagaacagtttatcaatcaatgtcacggacagcttcacctgattagcaagtttgcagttaataattattctcaagctacttatgctgatggcgattcccattatttcttgtttggacgagaagatacaggcctgccagaagattttatgcgagaacatgctgaaaaagcacttcgtattccgatgaatgatgagcatgtacggagtttaaatgtctcaaatacggtttgtatggtgatttatgaagcccttagacaacagggctttcaagggttagagttaaagcatacttacgaacacgataaactaaaataa

SEQ ID NO: 844 - protein, 182 aa, Streptococcus pyogenes
MTTKELINKNDKVKKARNHIVLFQPQIPQNTGNIARTCAATNAPLHIIKPMGFPIDDRKMKRAGLDYWDKLELHFYDHLEQFINQCHGQLHLISKFAVNNYSQATYADGDSHYFLFGREDTGLPEDFMREHAEKALRIPMNDEHVRSLNVSNTVCMVIYEALRQQGFQGLELKHTYEHDKLK

SEQ ID NO: 845 - DNA, 921 bp, Streptococcus pyogenes
atgaaaaaaagatatcagacattaaatgagcattaccgtcaactatttggcgcaaaaatgtttaaagttccgattgatgccggctttgattgtcccaatcgtgatggaacggtagctcatggaggatgtactttttgcacagtatcaggttctggagatgctattgtagcaccagatgctccaattaaagagcaattttataaagaaattgattttatgcaccgtaaatggcctgatgtcaatcgctatttggtttattttcaaaactttaccaatactcatgatacagttgatgtgattcgcgaccgttacgaacaagctattaacgaacctggagttgttggtattaatattggcacacggcctgactgtctaccagatgataccattgcttacttagcagaattatcagaacgcatgcatgtgacagtggagctaggcttacagacaacttatgaagaaacttctaggctaattaacagagcacattcttatgatttgtataaagaaacggtgaggcgactaaggcattaccccaacattaatattgtttcgcacttgattaatggattgccaaaagaaactcatgacatgatgcttgaaaatgtgagacgctgtgtaacagacaatgacattcaaggaattaaattgcatttgctgcatttgatgaccaatactagaatgcaaagagattatcatgaaggacgcttaaagttgttgagtcaaaaggactatgtttcgattatttgtgaccagctagagattatccctaagcatattgtgattcaccgtattacaggagatgccccacgcgatatgttgattgggcccatgtggagtctaaataagtgggaagtattgaatgccattgataaagaaatggaaagacgaggaagctttcagggctgtaaagttgactaa

SEQ ID NO: 846 - protein, 306 aa, Streptococcus pyogenes
MKKRYQTLNEHYRQLFGAKMFKVPIDAGFDCPNRDGTVAHGGCTFCTVSGSGDAIVAPDAPIKEQFYKEIDFMHRKWPDVNRYLVYFQNFTNTHDTVDVIRDRYEQAINEPGVVGINIGTRPDCLPDDTIAYLAELSERMHVTVELGLQTTYEETSRLINRAHSYDLYKETVRRLRHYPNINIVSHLINGLPKETHDMMLENVRRCVTDNDIQGIKLHLLHLMTNTRMQRDYHEGRLKLLSQKDYVSIICDQLEIIPKHIVIHRITGDAPRDMLIGPMWSLNKWEVLNAIDKEMERRGSFQGCKVD

SEQ ID NO: 847 - DNA, 1335 bp, Streptococcus pyogenes
atggaagaccctgtgagtcagtccttagtgattcaatttttattgttagttgttttaaccttgttaaatgcttttttttcagccagtgaaatggccttagtttctctcaatcgttctcgggtggaacaaaaagcagcagacggtgataaaaaatacgctcgtttgttgcgggttttagaggaacctaatcattttttatcaacgattcaagttgggattacctttattagtttactatcaggagcaagtttatcagcttctttgggtaaggtgatctcaggttggctaggtaattcagcgaccgcaaggacagctggtactatcatctccttggttttcttgacttatgtctctattgttttaggagaattgtatccaaaacggattgccatgaacctcaaagacaagttggcgattgtttcagcccctattatcattgggttagggagactggttagtccctttgtatggctcttatcagcttctactaatttactgagccgacttacccctatgacctttgatgatgcagatgagcaaatgacacgtgatgaaatcgagtatatgttatcaaaaagtgaggcgacccttgatgctgaagaaattgagatgttgcaaggagttttctcacttgatgaaatgatggcgcgtgaagtcatggtcccaaggaccgatgctttcatgattgacattaacgatgatccgcttgaaaatattcaggaaatcttaaaacaaagtttttcacgcattcctgtttatgatgtggataaagataaaattatcggtctcatccacactaagcgtctcttggagtcaggtttccgccagggatttgatcagattaacatgcgaaaaatgttacaagaacctctttttgttcccgaaaccatttttgtagatgatctcttacgccagctgcgcaatacccaaaatcagatggctattttgctagatgaatatggtggtgtggcaggacttgtgactttggaagacttgcttgaagaaatcgtcggtgaaatcgatgatgaaaccgataaagcagaacaatttgttcatgagattggagacaatacctatattgttgttggtactatgactttaaatgagtttaatgactattttgataccgaactagaatcagatgatgtagataccattgctggtttttatttgacaggtatcggaaccattccaagccaggagcaaaaagaagcctacgaaatagataacaaagacaaacatttagttctaatcaacgataaagtcaaagatggccgtattacgaaattaaaattaatcctgtctaatatagaacagattattgaggaagactag

SEQ ID NO: 848 - protein, 444 aa, Streptococcus pyogenes
MEDPVSQSLVIQFLLLVVLTLLNAFFSASEMALVSLNRSRVEQKAADGDKKYARLLRVLEEPNHFLSTIQVGITFISLLSGASLSASLGKVISGWLGNSATARTAGTIISLVFLTYVSIVLGELYPKRIAMNLKDKLAIVSAPIIIGLGRLVSPFVWLLSASTNLLSRLTPMTFDDADEQMTRDEIEYMLSKSEATLDAEEIEMLQGVFSLDEMMAREVMVPRTDAFMIDINDDPLENIQEILKQSFSRIPVYDVDKDKIIGLIHTKRLLESGFRQGFDQINMRKMLQEPLFVPETIFVDDLLRQLRNTQNQMAILLDEYGGVAGLVTLEDLLEEIVGEIDDETDKAEQFVHEIGDNTYIVVGTMTLNEFNDYFDTELESDDVDTIAGFYLTGIGTIPSQEQKEAYEIDNKDKHLVLINDKVKDGRITKLKLILSNIEQIIEED

SEQ ID NO: 849 - DNA, 792 bp, Streptococcus pyogenes
atgactgagaaagattatggacaagtaacagggatggtgcattcgacagaaagttttggttctgtagatggtccaggcattcgttttatcattttcttgcaaggctgtaaattacgttgccaatattgccataatccggatacttgggagatggaaaccaacaattcaaaaatcagaacagtcaatgatgtcttgaaagaagcccttcagtacaaacatttctggggaaaaaaaggaggaattaccgtatctggtggtgaagctatgcttcaaattgattttatcactgccttattcatcgaagctaaaaaattaggtatccataccacactagacacctgtggctttacctatagaccgacacctgaataccatcaggttcttgataacttattggcagtgaccgatttgattttattggacttaaaagaaattgatgaaaaacaacataaaattgtcacgcgtcagcctaataaaaacatattgcaatttgctaggtatttatccgacaagcagattcctgtctggattcgacatgtcttggttccaggcttgactgatattgatgatcatttgacacgattgggtgagtttgtcaaaaccttgaaaaatgtcgataaatttgaagttttgccttaccataccatgggagaattcaagtggcgtgagctaggtattccttatcagttagaaggtgttaaaccaccaactaaggaacgcgttcaaaatgctaaaaatctgatgcagaccgaatcttacacagaatatatgaatcggattcatcagtcataa

SEQ ID NO: 850 - protein, 263 aa, Streptococcus pyogenes
MTEKDYGQVTGMVHSTESFGSVDGPGIRFIIFLQGCKLRCQYCHNPDTWEMETNNSKIRTVNDVLKEALQYKHFWGKKGGITVSGGEAMLQIDFITALFIEAKKLGIHTTLDTCGFTYRPTPEYHQVLDNLLAVTDLILLDLKEIDEKQHKIVTRQPNKNILQFARYLSDKQIPVWIRHVLVPGLTDIDDHLTRLGEFVKTLKNVDKFEVLPYHTMGEFKWRELGIPYQLEGVKPPTKERVQNAKNLMQTESYTEYMNRIHQS

SEQ ID NO: 851 - DNA, 636 bp, Streptococcus pyogenes
atgatcacaggaaaactcataaccgttgaaggtccagatggcgcagggaaaacgactgttttagagcaactcattccactgttaaaacaaaaagtggctcaggatatcttgacaacaagagagcctggaggtgttgccatttcagaacacattagagaacttattttagacatcaaccatactgctatggaccctaaaacagaactcttactttatattgcggctcgaaggcagcatttggtggaaaaggtactaccagctcttgaagcaggccagttggtttttattgatcgtttcatcgatagttcagtagcttatcaaggtgcgggacgcggtttgatcaaagcagacattcagtggctcaacgagttcgcaacagatggtttagagcctgacttgaccctttattttgatgttccttctgaaattggtttagcacggattaacgcgaaccaacaaagagaagtcaatcgtttagatttggaaacaatagagatacatcaacgagtacgaaaaggatacctagccttagctaaggagcatccaaaacgtattgtcacaattgatgcgactaaaccattgaaagaagttgtctctgtcgctttggaacatgtcttagccttgcttttagcctag

SEQ ID NO: 852 - protein, 211 aa, Streptococcus pyogenes
MITGKLITVEGPDGAGKTTVLEQLIPLLKQKVAQDILTTREPGGVAISEHIRELILDINHTAMDPKTELLLYIAARRQHLVEKVLPALEAGQLVFIDRFIDSSVAYQGAGRGLIKADIQWLNEFATDGLEPDLTLYFDVPSEIGLARINANQQREVNRLDLETIEIHQRVRKGYLALAKEHPKRIVTIDATKPLKEVVSVALEHVLALLLA

SEQ ID NO: 853 - DNA, 240 bp, Streptococcus pyogenes
atggggaaacgaagcttgtcaaaagacttgcccgtagcgaccaaagtagcggcgcataagggcaaaaaagcttttgaagaaaatactgcctttgcaacagatttgatgaaagaagtatcacgattaataacacaaaatcaacttgaaatgacgtttgttaatagtgtctttctcttagatcagcatgttgtcctaattcccttttcagcagaagagcacatggatttttacaactgttaa

SEQ ID NO: 854 - protein, 79 aa, Streptococcus pyogenes
MGKRSLSKDLPVATKVAAHKGKKAFEENTAFATDLMKEVSRLITQNQLEMTFVNSVFLLDQHVVLIPFSAEEHMDFYNC

SEQ ID NO: 855 - DNA, 252 bp, Streptococcus pyogenes
atgccagaaaagaaagtgttgcccgtcctaagcatagtggtgagttttgtctgcctgcttgatcatatcttcttttttgctacttatagttatctctacttaccgcttgtagcaagtagtctagctcttatcggtctggtgcaaaacaaaggcaggcaaaaggtgtggtcgctagctggactcgtcctagctgctctagccgtggcagtagtggcctatgcctactatgacccaaccgtcatcccctactaa

SEQ ID NO: 856 - protein, 83 aa, Streptococcus pyogenes
MPEKKVLPVLSIVVSFVCLLDHIFFFATYSYLYLPLVASSLALIGLVQNKGRQKVWSLAGLVLAALAVAVVAYAYYDPTVIPY

SEQ ID NO: 857 - DNA, 237 bp, Streptococcus pyogenes
atgacatttgaagagattttaccaggtttaaaagccaagaaaaaatatgtacgtacaggttggggtggcgctgaaaattatgtgcagttgtttgatacccttgaagtggatgggaaagtactacaggcgacgccttattttctgattcatgttactggtgcaggtgaaggtttttccatgtgggcaccgacaccatgtgatgtgttagcagaggattggattgaggtcaatgactaa

SEQ ID NO: 858 - protein, 78 aa, Streptococcus pyogenes
MTFEEILPGLKAKKKYVRTGWGGAENYVQLFDTLEVDGKVLQATPYFLIHVTGAGEGFSMWAPTPCDVLAEDWIEVND

SEQ ID NO: 859 - DNA, 1338 bp, Streptococcus pyogenes
atggaagaggattataacaaaagagaacctgagaagtttacgcaatttctgcgccgtcaaaaggtcgtcttttttgtcgcattttttggttatgtgtgtgcttacttggtacgcaacaatttcaaactaatgtcaaacactattatggtgcaaaatggttgggacaaggctcaaattgcgatcttgttatcgtgtttgaccgtttcttatggcttagcaaaattctatatgggagccttaggggatcgtgttagcttgaggaagctcttttcaatcagcttgggtgcaagcgctttgatttgtattttaattggttttttcaatagttcaatggtggtattaggaatactgctagtcttgtgtggtgtcgtacaaggtgccttggcacctgcctcacaagccatgattgccaattattttccaaataaaacacgcggcggagccatcgctggatggaacatttctcaaaacatgggatcagccctcttgccattaaccatcgccttgctcaccagtatgggcttggtggtaccagctaatggcaatattttacttgcctttttaatccctggcgttttagtgttcttgtttgctttgtgttgctggaagcttggcggtgataaccctgagtctgagggacttgactctcttcgaacgatgtatggtgatgcgggcgagtcagctgttgccagtgaagaagaaaagcataacctgtcttattggcaactcatctggaaatacgttttttgtaacccgtcgctcttacttgttgctgctgtcaatgtggccctttattttgttcgttttgggattgaagactggatgccgatctacttgtcacaagtagccaatatgtcagaggctcatatccattttgcgatttcaatgttagagtgggtcgctattccaggctcgctggtatttgcgtggttagcggttcgttatcctaataaaatggccaaggttggggctattgggctttttgtgttagcggctattgtctttgtctatgaacgcttgactgccacaggtgctccaaattatttcttgttgcttgttattgcaggtattttagggtcattgatttatggcccacagttgatcgtgaatattttaacaatcaactttgttcctttaaatgttgcaggaacagcgattggttttgtaggagtaacagcttatctcatcggcaatatgggagcaaactggctgatgccgattttggcagatggttttggctggttttggtcatatattgtcgttgcagccttatctgctttttcagcggttggttatttgattttagccaaacgtgaggaagaaatcatcaaagattag

SEQ ID NO: 860 - protein, 445 aa, Streptococcus pyogenes
MEEDYNKREPEKFTQFLRRQKVVFFVAFFGYVCAYLVRNNFKLMSNTIMVQNGWDKAQIAILLSCLTVSYGLAKFYMGALGDRVSLRKLFSISLGASALICILIGFFNSSMVVLGILLVLCGVVQGALAPASQAMIANYFPNKTRGGAIAGWNISQNMGSALLPLTIALLTSMGLVVPANGNILLAFLIPGVLVFLFALCCWKLGGDNPESEGLDSLRTMYGDAGESAVASEEEKHNLSYWQLIWKYVFCNPSLLLVAAVNVALYFVRFGIEDWMPIYLSQVANMSEAHIHFAISMLEWVAIPGSLVFAWLAVRYPNKMAKVGAIGLFVLAAIVFVYERLTATGAPNYFLLLVIAGILGSLIYGPQLIVNILTINFVPLNVAGTAIGFVGVTAYLIGNMGANWLMPILADGFGWFWSYIVVAALSAFSAVGYLILAKREEEIIKD

SEQ ID NO: 861 - DNA, 252 bp, Streptococcus pyogenes
atgggaaggccattgttgaccgatgatatcatcgaaaaagcgagacgaatggaaacatttgagccagatgatgctgtaaactttgacacaaaagtaatgacgctaccagaaaaagatgataaagcacgcatttataaaagtcgtcggattgaaaatgccaaacgcagccaattgcaatctaaattaaatgtgattttgatagctgttatgctgttaattgccatcttggtatatgctatcttttatctttaa

SEQ ID NO: 862 - protein, 83 aa, Streptococcus pyogenes
MGRPLLTDDIIEKARRMETFEPDDAVNFDTKVMTLPEKDDKARIYKSRRIENAKRSQLQSKLNVILIAVMLLIAILVYAIFYL

SEQ ID NO: 863 - DNA, 933 bp, Streptococcus pyogenes
atgggaaagagaatgagcctcattttgggtgcttttttatctgtttttcttttagtagcttgttcgtcaactggcactaaaactgctaagagtgataaattaaaagtcgtggcaaccaattcaattattgccgacatgacaaaagctattgctggtgataaaatcgatctgcacagcattgtgccaatcggtcaagaccctcatgagtacgaaccattaccagaagatgttgaaaaaacaagtaatgctgatgtgattttctataatggtatcaatctagaagatggcgggcaagcttggttcaccaaactagtgaaaaatgctcaaaaaacgaaaaacaaagattactttgccgtgtctgatggcattgatgtgatttacttggaaggtgcaagcgaaaaaggaaaagaagatccacatgcttggttaaatctcgaaaacggaatcatttattcaaaaaacattgccaaacaattgattgcaaaggatcctaaaaacaaagaaacttatgaaaagaacctaaaagcttatgtggctaaattggaaaaactagacaaagaagccaaatcaaaatttgatgctattgcagaaaataaaaaattgattgtgactagtgaaggctgcttcaagtacttttcaaaagcttacggtgtcccatctgcttatatctgggaaattaacaccgaagaagaaggaacaccagatcaaatttcatcattgattgaaaaactaaaagtcatcaagccatctgcgctttttgtagagtcaagtgtcgatagacgccctatggaaactgtttctaaagatagtggtattcctatttattctgagatctttacagattcaattgctaaaaaaggtaaacctggcgatagttattatgctatgatgaaatggaaccttgacaaaatttctgaaggtctagcaaaataa

SEQ ID NO: 864 - protein, 310 aa, Streptococcus pyogenes
MGKRMSLILGAFLSVFLLVACSSTGTKTAKSDKLKVVATNSIIADMTKAIAGDKIDLHSIVPIGQDPHEYEPLPEDVEKTSNADVIFYNGINLEDGGQAWFTKLVKNAQKTKNKDYFAVSDGIDVIYLEGASEKGKEDPHAWLNLENGIIYSKNIAKQLIAKDPKNKETYEKNLKAYVAKLEKLDKEAKSKFDAIAENKKLIVTSEGCFKYFSKAYGVPSAYIWEINTEEEGTPDQISSLIEKLKVIKPSALFVESSVDRRPMETVSKDSGIPIYSEIFTDSIAKKGKPGDSYYAMMKWNLDKISEGLAK

SEQ ID NO: 865 - DNA, 726 bp, Streptococcus pyogenes
atgattacaactaacaatctttgtgtgacctacgatggcaacagtaatgctttagaagcgattaatgtgacaattgaaggtccttctatcgttggtattattggtcctaatggagctggaaaatcaacctttatgaaagctatcttaaatcttattgattatcaaggtcacgtaacggttgatggcaaagatggtcgtaagcttgggcatacagtagcttacgtagaacaacgaagcatgattgactataattttcctattactgttaaagaatgtgttgcgctagggacttatagtaaattaggcctttttcgccgagtaggaaaaaaacaatttgagcaggttgataaggttctcaaacaagttggtttagaagactttggccatcgaccgataaaatccttatctggtggtcagtttcagcggatgttggttgcgcgttgcttgattcaagaatcagactatattttcttagatgaaccgtttgttggcattgactcggtcagcgaaaaaatcattgtagatcttttgaaagagctcaaaatggctggcaaaacgattttaattgtacatcatgatttgagcaaagtagagcattattttgacaaactcatgattttaaataaacatttggtggcttatggcaacgtttgtgaggtatttactgttgataccttgtcaaaagcttatggcaatcatttgattttaggaaaggagatggtgtaa

SEQ ID NO: 866 - protein, 241 aa, Streptococcus pyogenes
MITTNNLCVTYDGNSNALEAINVTIEGPSIVGIIGPNGAGKSTFMKAILNLIDYQGHVTVDGKDGRKLGHTVAYVEQRSMIDYNFPITVKECVALGTYSKLGLFRRVGKKQFEQVDKVLKQVGLEDFGHRPIKSLSGGQFQRMLVARCLIQESDYIFLDEPFVGIDSVSEKIIVDLLKELKMAGKTILIVHHDLSKVEHYFDKLMILNKHLVAYGNVCEVFTVDTLSKAYGNHLILGKEMV

SEQ ID NO: 867 - DNA, 426 bp, Streptococcus pyogenes
atggctaaaaaagtcgaaaaacttgtaaaacttcaaatccctgctggtaaagctacaccagctccaccagttggaccagctcttggtcaagcaggtatcaacatcatgggcttcactaaagaatttaacgctcgtacagctgatcaagctggtatgatcatcccagttgttatctcagtttatgaagacaaatcatttgatttcatcactaaaacaccaccagctgctgttcttttgaaaaaagctgcaggtgttgaaaaaggatcaggtacacctaacactactaaggttgcgacagttactcgtgcacaagtacaagaaattgctgaaactaagatgccagatttgaacgctgcaaacattgaagctgcaatgcgtatgatcgaaggtactgctcgttctatgggattcactgttactgactag

SEQ ID NO: 868 - protein, 141 aa, Streptococcus pyogenes
MAKKVEKLVKLQIPAGKATPAPPVGPALGQAGINIMGFTKEFNARTADQAGMIIPVVISVYEDKSFDFITKTPPAAVLLKKAAGVEKGSGTPNTTKVATVTRAQVQEIAETKMPDLNAANIEAAMRMIEGTARSMGFTVTD

SEQ ID NO: 869 - DNA, 216 bp, Streptococcus pyogenes
atgagaaaatcattttacagctggctgatgacacaacgtaaccctaaatcaaatgaacctgtggcgattttagcagatttggtgtttgatgacaccacttttccaaagcataccaatgattttgaactcattagtcggtatctagaagatcaagctagtttttcctttaatttaggtcaatttgatgaaatctgggaagattatctagcacattaa

SEQ ID NO: 870 - protein, 71 aa, Streptococcus pyogenes
MRKSFYSWLMTQRNPKSNEPVAILADLVFDDTTFPKHTNDFELISRYLEDQASFSFNLGQFDEIWEDYLAH

SEQ ID NO: 871 - DNA, 498 bp, Streptococcus pyogenes
atgtatatcgagatgattgacgaaacgggacaagtttcgcaagagattatggagcaaacacttgatttgctcaattttgctgctcaaaagacgggcaaagaagaaaaagaaatgtctgtgacctttgtgaccaatgaaagaagtcatgaactcaacttagaataccgagatactgatcgtccaacagatgtgatttctctagaatataagccagaaacgcctattttatttagtcaagaggatttggctgctgatcctagtttggcagagatgatggcagagtttgatgcttatattggcgaattgtttatttctattgacaaggcgcgtgagcagtcccaagaatatgggcactcttttgagcgtgaaatgggatttttggctgttcatggattcttacatattaatgggtatgatcactacacccttgaagaagaaaaagagatgtttaccttacaggaagagattttgactgcttatggccttacacgacaataa

SEQ ID NO: 872 - protein, 165 aa, Streptococcus pyogenes
MYIEMIDETGQVSQEIMEQTLDLLNFAAQKTGKEEKEMSVTFVTNERSHELNLEYRDTDRPTDVISLEYKPETPILFSQEDLAADPSLAEMMAEFDAYIGELFISIDKAREQSQEYGHSFEREMGFLAVHGFLHINGYDHYTLEEEKEMFTLQEEILTAYGLTRQ

SEQ ID NO: 873 - DNA, 477 bp, Streptococcus pyogenes
atgccacaagactacatttcttatatccgctccaaagttgggcatgataagattattcttaactttgctggtgggattttgaccaatgatgacggcaaggtgctgatgcagctgcgtggtgataagaaaacctggactattcctggtggcactatggaactgggtgagagctctttagagacttgcaaacgtgagttcttagaggaaaccggaattgaggttgaagctgttcgcttactgaatgtttacactcattttgaggaagtttatcccaacggtgatgctgttcagactattgtctttatctatgaactaacggctgtttctgatatggctattgataactttcataatgaggaaacgctcaagttacaatttttctctcatgaggagatagcagagttagagagtgtctcagccaaacatcgcctgatgttagaggaatattttagtgatagctttgctatggggcattaa

SEQ ID NO: 874 - protein, 158 aa, Streptococcus pyogenes
MPQDYISYIRSKVGHDKIILNFAGGILTNDDGKVLMQLRGDKKTWTIPGGTMELGESSLETCKREFLEETGIEVEAVRLLNVYTHFEEVYPNGDAVQTIVFIYELTAVSDMAIDNFHNEETLKLQFFSHEEIAELESVSAKHRLMLEEYFSDSFAMGH

SEQ ID NO: 875 - DNA, 867 bp, Streptococcus pyogenes
atggaaaaagaactcggaaaaaccttaaggcgattacgtaagggtaagcaggttagcatttcttttttagcagatgaatacctgtccaagtcacaaatttcaagatttgaacgaggggaatcagaaatcacctgcagtcgcttgcttaatcttttggataaactgaatattacgattgacgaatttgtttcggctcattccaagacgcatacgcattttttcacgctcttaagtcaggcgagaaaatgttatgctgagaaaaacgtggttaaattgaccaaactgttgaaggattatgcccataaagattatgaacgaacgatgattaaagctattcttttttctattgactcctcaattgcacctagtcaagaagaattgactcgcctcacagattatttatttaaagtggaacagtggggatattatgaaatcattcttctggggaattgctcgcgcttcatgaattacaataccctatttttattgactaaggaaatggtagcatcttttgcttattcggaacaaaataaaaccaataaaatgttagtgactcagttatccattaattgtctcattatcagtattgaccattcttgctttgaacatagtcgctatttgattaacaaaattgatcttttgctgcgagacgagctcaatttttatgaaaagactgttttcttatatgtgcatgggtattataaattaaagcaggaagaaatgtctggagaagaggacatgcggcaggccttgcagatttttaagtatcttggagaggactcattgtattatagttataaggaacattaccgtcaaatagtgctgggaggtaagggggatgaggactggtctgaggcagatttatga

SEQ ID NO: 876 - protein, 288 aa, Streptococcus pyogenes
MEKELGKTLRRLRKGKQVSISFLADEYLSKSQISRFERGESEITCSRLLNLLDKLNITIDEFVSAHSKTHTHFFTLLSQARKCYAEKNVVKLTKLLKDYAHKDYERTMIKAILFSIDSSIAPSQEELTRLTDYLFKVEQWGYYEIILLGNCSRFMNYNTLFLLTKEMVASFAYSEQNKTNKMLVTQLSINCLIISIDHSCFEHSRYLINKIDLLLRDELNFYEKTVFLYVHGYYKLKQEEMSGEEDMRQALQIFKYLGEDSLYYSYKEHYRQIVLGGKGDEDWSEADL

SEQ ID NO: 877 - DNA, 684 bp, Streptococcus pyogenes
atggagtggattaaattaatcggtattgtgattatcgtattagggtttattttaaaatgtgatgctatcgctaccgtagttgttgcaggacttgttaccgcgctggtttcaggaatttcgtttattgattttctagatattttaggaaaagaatttaccaatcaacgtttgctaaccattttcttcatcactttaccgcttatcggcttgtcagaaacttatgggctgaaacaccgagctactcagttgattcaacgtgttcaagcccttaccgtcggccgtttattgactctctaccttattattcgagaattagcaggtctcttttcgattcgactagggggacatccacagttcgttcgacccttgattcaacctatgggagaagctgctgctaaagccaacattggagaagagttgaccgatgcagaaaaagatgacatcaaagctatggcagctgccaatgaaaactttggcaatttctttgcccaaaatacctttgttggcgcaggaggtgtcctacttatcgctggaactttagaacagcttggctatgatggtaaccaagctaaaattgcattttcttctattttaattgctattatctctattattatagttgctatttacaattacctctttgagaaaaaaatggaacgtcaacatcagaaaggagataactaa

SEQ ID NO: 878 - protein, 227 aa, Streptococcus pyogenes
MEWIKLIGIVIIVLGFILKCDAIATVVVAGLVTALVSGISFIDFLDILGKEFTNQRLLTIFFITLPLIGLSETYGLKHRATQLIQRVQALTVGRLLTLYLIIRELAGLFSIRLGGHPQFVRPLIQPMGEAAAKANIGEELTDAEKDDIKAMAAANENFGNFFAQNTFVGAGGVLLIAGTLEQLGYDGNQAKIAFSSILIAIISIIIVAIYNYLFEKKMERQHQKGDN

SEQ ID NO: 879 - DNA, 819 bp, Streptococcus pyogenes
atgtggtcattttggaaacgttatagaccctttctcagtgcaggaattcaggaattaataacctatcgcgttaatttctttttgtatcgtattggagatgtcatgggggcttttgtggcttattacctctggaaggctgtttttgattcgtctaagcaatccttaatcaatggttttactctgtctgacatgaccttttacattatcatgagttttgtgaccactttactgaccaaatcagacagctcctttatgattggcgaagaagtgaaagatggttctatcatcatgcgcctgcttcgaccagttcattttgcagcctcttacctctttatggaaattggttttcgctggattgtgctaatgagtgtcggctttccttttttaatggtcttatctggtattaaagtcatggcggggctgtctatcttgcaagtcctagccagcagttgtctgtatttagttagccttttattagcttttttaatcaatttttatttcaacatttgttttggctcttcagcatttgtctttaaaaacctttgggggtctaatttattgaaaaatgccttggttgcctttatgtcaggcagtttgattccattggctttttttcctaaaatggtttctatagtgcttagttttctaccgttttcctctttggtttacacgccagttatgattgtcattgggaaatacagccttagtcagataatggtggccctaagtttgcaaatcttttggttactggtgatggtagtcttatcgcaagtcatctggaaaaaggttcagtaccatttaacgattcaaggagggtga

SEQ ID NO: 880 - protein, 272 aa, Streptococcus pyogenes
MWSFWKRYRPFLSAGIQELITYRVNFFLYRIGDVMGAFVAYYLWKAVFDSSKQSLINGFTLSDMTFYIIMSFVTTLLTKSDSSFMIGEEVKDGSIIMRLLRPVHFAASYLFMEIGFRWIVLMSVGFPFLMVLSGIKVMAGLSILQVLASSCLYLVSLLLAFLINFYFNICFGSSAFVFKNLWGSNLLKNALVAFMSGSLIPLAFFPKMVSIVLSFLPFSSLVYTPVMIVIGKYSLSQIMVALSLQIFWLLVMVVLSQVIWKKVQYHLTIQGG

SEQ ID NO: 881 - DNA, 996 bp, Streptococcus pyogenes
atgaaacaagctatcttagatcgctatcaggccttgaaatgctatcaaaacgcaggtttatcaaaccaagcatttcgtgctatagctaaagagcctatcattgataatcgacttggttctccaactttctgggtaatatggcctattgaaaaagaaaaccaatcagctaagcagttactaacgtttcttcttgatttggtagagatgccatttgagctaagtggtcagttgcatgaaactcaaacgctactcacccgattccatccatctctattgccagatcatatgttttggaaagagttggctagcttagttgatcaagcttttcctggcaaaacactaagccaagcaggtgagcttgaaaagcgtttgcatcaatttcgttatgtcatctctagtcaacaagctcaatctatcagaaaccattataaaatgattgagatgacagacgcccaagctctggccctttttttgaggtctaaaaaagggccttgtttgtggcggcaagcaccagattataccttgatggattctgccaggttacataataaactaagatttgaagataataaagtcatttttccaagtcaagaagtttcctataatataaaagtacttctttggtttcataccgaatttactctagatagcacaggcttttttcttaatgaagttgatgcagaagtagtgaccgaaaaaggaattgtcaatggtgcatcttttaactatggcacagatggtcctagacattgggatttagatgttgatccgattagccatcacgatcctcagtttagaagagacacccttaaaggatttcgatcgccaaaaagagtatttcgccagtggtttagagctcaaaaagatgactttatgttctcttattttaatgccaaaggactttttgcttaccacaacaagagtagttttgccagagtcaaaaaatcagctaagcaattcaaacgtcaaattcatcctataaagggttggttttag

SEQ ID NO: 882 - protein, 331 aa, Streptococcus pyogenes
MKQAILDRYQALKCYQNAGLSNQAFRAIAKEPIIDNRLGSPTFWVIWPIEKENQSAKQLLTFLLDLVEMPFELSGQLHETQTLLTRFHPSLLPDHMFWKELASLVDQAFPGKTLSQAGELEKRLHQFRYVISSQQAQSIRNHYKMIEMTDAQALALFLRSKKGPCLWRQAPDYTLMDSARLHNKLRFEDNKVIFPSQEVSYNIKVLLWFHTEFTLDSTGFFLNEVDAEVVTEKGIVNGASFNYGTDGPRHWDLDVDPISHHDPQFRRDTLKGFRSPKRVFRQWFRAQKDDFMFSYFNAKGLFAYHNKSSFARVKKSAKQFKRQIHPIKGWF

SEQ ID NO: 883 - DNA, 852 bp, Streptococcus pyogenes
atgaaatcaaaacttggtgccacacttagaaaagttcgaaaaggaaagcaaattagtctgtgcttcgtggcagatgaacacctttcaaaatcacaaatctctcgttttgagcgcggggagtcagagatatcgtgtatccgactgatcaatattctagacaaattacacattactttggatgagtttcttattttacatgatgaagactataccaattccgaaacatttgctaacctggtacagtatattcgtaagcaatattcatcacaaaatatcaataatatagcatgtttactttccgacacttctgattacactctgaattcttttgagaaaacaatggtaaagtccattttacacacaatggattcaagcatcattccatcagatgatgaattacttcaactaacagattatctctttaaagttgaaaaatggggctactatgaaatccttttgttgggtaactgtgtacgaacaattaactacaactcctacttcctattgacaaaggagatgttaaataattacatttactcttcacggaacaaaactaataaacgaattgtcactcagcttgctataaattgtttcattcttagtatcaataaggaggaattttctaattgctcctatttaattgatgagataaaaaccttgttagataatgaattaaacttctatgaacagacagtttttctctatgcaacaggttactttgaatttaagcgccaattagaaactggagttgaaaagatgaaacaagccatacaagttcttgatattttaaatgaagacaagttaaaattacattacgctgaccattttgataaactagtcaacaaagattaa

SEQ ID NO: 884 - protein, 283 aa, Streptococcus pyogenes
MKSKLGATLRKVRKGKQISLCFVADEHLSKSQISRFERGESEISCIRLINILDKLHITLDEFLILHDEDYTNSETFANLVQYIRKQYSSQNINNIACLLSDTSDYTLNSFEKTMVKSILHTMDSSIIPSDDELLQLTDYLFKVEKWGYYEILLLGNCVRTINYNSYFLLTKEMLNNYIYSSRNKTNKRIVTQLAINCFILSINKEEFSNCSYLIDEIKTLLDNELNFYEQTVFLYATGYFEFKRQLETGVEKMKQAIQVLDILNEDKLKLHYADHFDKLVNKD

SEQ ID NO: 885 - DNA, 735 bp, Streptococcus pyogenes
atgaatttgagtatatttggtttaaagaatattccttatttgaaagaaggggatagtatagaaaagcttattgaagaaagcattaaaacttcagaattttttatcgaagacaatgatgtgctttgcatagcttctaaagttgtatctatcgcagaaggccaggtgatgtctttaaacgagatacaagtgagtgatgtagcaaaagaaatccacaggaatattcctcgtaaagatcctagaataattgaaattatgctaaatttagtcaatagagatctgtcacgtttagatatcaaaaaaaattacattggttgtcgcttggaaaatggtttaaagttgacaagtggtggaatcgatagaaaatcagtagatgaagtatttcttttacctaataatccggatgcttctgcaaaaagaatttcggaatatcttaaaaaatcacttggaaaaaatgttgcagttgttataacagatagtgatggtagagaggataaaagaggtgctactcaagtagcaattggtatttatggtattcatcctttgagaaaaacagaagtaatagattcacaaggagagacaataaaattccaagaagagactttgtgtgatatgattgcagcttgtgctggcttagtaatggggcaacgtggaactggaattccagctgtcctcattaggggcttggattataaatggtctgaaaatactagtattaaggaagcattaaatgagtag

SEQ ID NO: 886 - protein, 244 aa, Streptococcus pyogenes
MNLSIFGLKNIPYLKEGDSIEKLIEESIKTSEFFIEDNDVLCIASKVVSIAEGQVMSLNEIQVSDVAKEIHRNIPRKDPRIIEIMLNLVNRDLSRLDIKKNYIGCRLENGLKLTSGGIDRKSVDEVFLLPNNPDASAKRISEYLKKSLGKNVAVVITDSDGREDKRGATQVAIGIYGIHPLRKTEVIDSQGETIKFQEETLCDMIAACAGLVMGQRGTGIPAVLIRGLDYKWSENTSIKEALNE

SEQ ID NO: 887 - DNA, 1038 bp, Streptococcus pyogenes
atgtcaacagttaaacgctatgatgaagaattcaaacaatctcttgttaacctttatcaaactggaaaaactcggtctgaactctgtaaagactatggggtatccgcttctgcgcttgcaaaatggatcaaacagtattcccaagtcaaactcgaagataattctgtacttactgccaagcaaatacaagagctacaaaaacgtaatgcgcagcttgaagaggagaaccttatcctaaaaaaaagcaagtgccatattcatgcaaaacttaaagtaagactcctcgctgtttatcggttacgctttgaacacgtcacaacaaccttgtatcgtgttttacgtgtcaatcgctccacttactataaatttctaaaacataagccctcaaaaagagaattggataatcaaatttatagaaaacaaatacttgagatttataccaaagcaaacaaaagacttggtgtgaagtctatcaaagtcattcttcaaagagactacgacacaaaaatctctgaaggaagaatttaccgtctaatgaagaatatggcgctccctaaaatggctaccgttaagccaaaaacagctcttaaaaggactcaaaaaacgtatcctcaaaacttactcaaccagaaatttaatcctgacaaacctaatcaagtatggtctactgacttcacctatatttctattggatataagaaatatgtctatctctgcgcaatacttgatctctattctagaaaatgtattgcttggaaactgagtcaccgtatggatgcaaagttagcatgtgacactctagaattagctcttaataaaagaaagattgaaggaacacttctctttcattccgaccaagggtcacaatttaaggccagggaattgagaaaaataattgatgacaacactatcatgcattctttttctaaacctggatatccttatgataatgccgtaactgaagcatttttcaagtatttaaagcatagacaaatcaaccaaaaaaagtatcaaacaggttcaattagactgctttga

SEQ ID NO: 888 - protein, 345 aa, Streptococcus pyogenes
MSTVKRYDEEFKQSLVNLYQTGKTRSELCKDYGVSASALAKWIKQYSQVKLEDNSVLTAKQIQELQKRNAQLEEENLILKKSKCHIHAKLKVRLLAVYRLRFEHVTTTLYRVLRVNRSTYYKFLKHKPSKRELDNQIYRKQILEIYTKANKRLGVKSIKVILQRDYDTKISEGRIYRLMKNMALPKMATVKPKTALKRTQKTYPQNLLNQKFNPDKPNQVWSTDFTYISIGYKKYVYLCAILDLYSRKCIAWKLSHRMDAKLACDTLELALNKRKIEGTLLFHSDQGSQFKARELRKIIDDNTIMHSFSKPGYPYDNAVTEAFFKYLKHRQINQKKYQTGSIRLL

SEQ ID NO: 889 - DNA, 933 bp, Streptococcus pyogenes
atgaccgttactgtaaagatgctagtgcaaaaagttaaacttgatgtggtttatgctacagataacttgctgtcaaaagagataacaacatcagatatttcacgtccaggtcttgaaatgactggttattttgattattatgctccagaaaggttgcagctatttggaatgaaagagtggtcttatcttacacagatgacttctcacaaccgttattctgttttaaaagagatgttcaaaaaggacactcctgcagtggttgtctctagaaatttagccattccaaaagaaatggttcaagctgcaaaagaagaaggtatttcacttttaagtagccgtgtttcaactagccgcttagctggagaaatgtcttattttcttgacgcttctttagctgaacgtactagtgttcacggcgttttaatggatatttatggtatgggggttcttatccaaggggattctggaattggtaaaagtgagactggtttagaattagttaagcgagggcatcgtttggttgcagatgaccgtgtggatgtctatgccaaagatgaagaaaccctttggggagagccagcagagatcttgcgccacttgcttgaaattcgtggggtaggtattattgatgtgatgtcgctttatggagctagtgctgtgaaggactcatcacaagttcaattggccatttaccttgaaaactttgaggctggtaaagtttttgatcgtctcggaaacggaaatgaggagataactttctcaggagtgagaatccctcgtattcgtattccggtaaaaacaggtcgaaatgtttcagtggttattgaagccgctgcgatgaatcatcgggctaaagaaatgggctttgatgctacaaaaacttttgaagatcgtttaactcaactaatcaccaaaaatgaggtgagtcaatga

SEQ ID NO: 890 - protein, 310 aa, Streptococcus pyogenes
MTVTVKMLVQKVKLDVVYATDNLLSKEITTSDISRPGLEMTGYFDYYAPERLQLFGMKEWSYLTQMTSHNRYSVLKEMFKKDTPAVVVSRNLAIPKEMVQAAKEEGISLLSSRVSTSRLAGEMSYFLDASLAERTSVHGVLMDIYGMGVLIQGDSGIGKSETGLELVKRGHRLVADDRVDVYAKDEETLWGEPAEILRHLLEIRGVGIIDVMSLYGASAVKDSSQVQLAIYLENFEAGKVFDRLGNGNEEITFSGVRIPRIRIPVKTGRNVSVVIEAAAMNHRAKEMGFDATKTFEDRLTQLITKNEVSQ

SEQ ID NO: 891 - DNA, 1494 bp, Streptococcus pyogenes
atgtctaatcaacacatcgaagaattaaatgaccaacagattgtccgtcgtgaaaaaatgacggcgctggctgaacaaggaattgatcctttcggtaaacgctttgaccgcacagccaattctgctgaattaaaagaaaagtatgctgataaaacaaaagaagaattacatgagttaaacgaaacagctattgttgctggccgcttgatgacaaaacgtggcaaaggtaaggttggttttgctcatcttcaagaccgtgaaggccaaatccaactttatgttcgcaaggactctgttggcgaagacaactatgaaatcttcaaaaaagccgatttaggcgactttatcggcgttgaaggcgaagtcatgcgtacagacatgggcgagttgtcaatcaaggcaaccaagttgactcacctttctaaatcacttcgtcctcttcctgaaaaattccacggattaactgatattgaaaccatttaccgtaagcgtcaccttgatttaatttcaaatcgtgaaagctttgaccgcttcgtgacccgttccaaaatgatttcagaaatccgtcgttatttagacggtcttgatttcctagaagtagaaacgcctgtgcttcataacgaggctggtggtgctgctgctcgtcctttcgttactcaccataatgctcaaaacattgatatggtgcttcgtatcgcaacagaacttcatttgaaacgtttgattgttggtggtatggaacgtgtctatgaaattggtcgtatcttccgtaacgagggaatggatgctactcataatcctgagttcacttctattgaggtttaccaagcctatgcagactatcttgatatcatgaacctgacagaaggcattatccaacatgctgctaaagctgttagaggtgatggccctattgattatcaaggaactgaaatccgtatcaatgaacctttcaaacgtgttcacatggtagatgctatcaaggaagtgacaggtgctgatttctggcctgaaatgactgtcgaagaagctattgcacttgccaaagaaaaacaggtcccactcgaaaaacacttcataagtgtcggacatatcatcaacgctttcttcgaggaatttgttgaagaaaccttggtccaaccaacctttgtgtttggtcatcctgttgaagtatcgcctttggctaagaagaatccagaagatacccgcttcaccgaccgcttcgaacttttcatcatgaccaaagaatacgccaatgctttcacagagttgaatgatcccattgaccaattatctcgttttgaagcacaagcacaagctaaagaacttggtgatgacgaagcaactggcattgactacgacttcgttgaagctcttgaatatggtatgccgccaaccggtggactcggaatcgggattgatcgtctttgcatgttattaacaaacacaacaacaatcagagatgtgcttttattcccaacgatgaaaccttaa

SEQ ID NO: 892 - protein, 497 aa, Streptococcus pyogenes
MSNQHIEELNDQQIVRREKMTALAEQGIDPFGKRFDRTANSAELKEKYADKTKEELHELNETAIVAGRLMTKRGKGKVGFAHLQDREGQIQLYVRKDSVGEDNYEIFKKADLGDFIGVEGEVMRTDMGELSIKATKLTHLSKSLRPLPEKFHGLTDIETIYRKRHLDLISNRESFDRFVTRSKMISEIRRYLDGLDFLEVETPVLHNEAGGAAARPFVTHHNAQNIDMVLRIATELHLKRLIVGGMERVYEIGRIFRNEGMDATHNPEFTSIEVYQAYADYLDIMNLTEGIIQHAAKAVRGDGPIDYQGTEIRINEPFKRVHMVDAIKEVTGADFWPEMTVEEAIALAKEKQVPLEKHFISVGHIINAFFEEFVEETLVQPTFVFGHPVEVSPLAKKNPEDTRFTDRFELFIMTKEYANAFTELNDPIDQLSRFEAQAQAKELGDDEATGIDYDFVEALEYGMPPTGGLGIGIDRLCMLLTNTTTIRDVLLFPTMKP

SEQ ID NO: 893 - DNA, 480 bp, Streptococcus pyogenes
atgcctaatctctatgattttacggttaaggctcaggacggcagtgacatctcactagttgactacaaagaaaaagtggttttggtcgtgaatacagctaccaaatgtgggctaaccccacaataccaggccttgcaagcactatatgacacataccatgacaagggatttgaggtcttagattttccttgcaaccaatttttaaatcaagctccaggagatgctgaggagattaatcacttttgcagtctgacctatcacactactttccctcgctttgcaaaaatcaaagtgaatggtaaagacgctgatcctttgttcacctggttaaaagaagaaaaaagtggtccccttgggaaacgcatcgaatggaatttcactaaatttctcattgaccaaaatggtcaagtcattaaacgctattcctcaaagacagatcctaaactaattgaagaagaccttaaagcacttcttggttaa

SEQ ID NO: 894 - protein, 159 aa, Streptococcus pyogenes
MPNLYDFTVKAQDGSDISLVDYKEKVVLVVNTATKCGLTPQYQALQALYDTYHDKGFEVLDFPCNQFLNQAPGDAEEINHFCSLTYHTTFPRFAKIKVNGKDADPLFTWLKEEKSGPLGKRIEWNFTKFLIDQNGQVIKRYSSKTDPKLIEEDLKALLG

SEQ ID NO: 895 - DNA, 1800 bp, Streptococcus pyogenes
atggaattgaaaaaacgttcagaattccctgaaaatgaactttgggatctaacagcgctctacaaagaccgccaagattttttactcgctattgaaaaagccttacaagatattgacctgtttaagcgcaattatgaaggccgcttaacgtcggtggacgatttcactcaggccttaatagaaattgagcatatttatattcaaatgagtcatattggcacttatgcctttatgcctcaaaccactgacttttcagatgaaagttttgctcaaattgctcaggctggcgatgatttcatgactaaagctagcgttgcccttagcttctttgacaccgccttagccaatgccgaccttgacgtgttagatacattagaaaagaacccttatttcagcgcagctattcgcatggcaaaaattcaaaaagaacacctcttaagtcctgatgtggaaaaagctttggctaacttacgcgaggttatcaatgcgccctatgatatttacaccaaaatgcgggctggtgactttgacatggatgattttgaggtggatggtaaaacctataaaaatagctttgtttcttacgaaaatttctatcaaaatcacgaaaatgctgagattcgtgaaaaagccttccgctctttttcaaaaggtctccgtaaacaccaaaatacagctgcagcggcttacttagccaaggttaaatctgaaaaattgttagcggatatgaaaggctacgcttctgtctttgattacctcctagctgaacaggaagtggatcgtagcttgttcgaccgccaaattgacctcatcatgactgaatttggaccggttgctcagaaattcttaaaacatgtcgcccaagtcaatggtcttgagaaaatgacttttgctgactggaagctagatattgacaatgatctcaatccagaggtcagcattgatggtgcctatgacctcgtgatgaaatctctagccccattagggcaagaatacacgaaagaaatcgaacgttatcagacagaacgctgggttgactttgctgctaacgccaataaggattctggtggttatgccgctgatccctacaaggttcatccgtatgtcttaatgagttggactggaagaatgtctgatgtttatacccttattcatgaaatcggtcactctggccaattcattttttcagataatcaccaaagttacttcaacacccatatgtcaacttattacgtcgaagcgccatcgacctttaatgaattgatgcttagtgattacttggaacatcagtttgatgaccctcgtcaaaaacgttttgcccttgctcaccgtttaacagatacttactttcataacttcatcactcacctattggaagcggctttccaacgtaaggtttacacccttattgaagaaggcggtacctttggagctgaccaattaaatgcgatgatgaaagaggtcttaacagacttctggggagatgccgttgacattgacgatgacgcagctcttacctggatgcgccaagcacattactacatgggcttatatagttatacctattctgctgggcttgttatttcaacagctggttacctcaaccttaaacataatccaaatggtgccaaggagtggcttgacttcctaaaatcaggtggcagccgtacgcctcttgatactgcaatgctcattggggcagacattgccactgaaaagcctcttcgagataccattcaattcttgagtgataccgttgaccaaattatcagttacaccgaggatatgtcacatgcctaa

SEQ ID NO: 896 - protein, 599 aa, Streptococcus pyogenes
MELKKRSEFPENELWDLTALYKDRQDFLLAIEKALQDIDLFKRNYEGRLTSVDDFTQALIEIEHIYIQMSHIGTYAFMPQTTDFSDESFAQIAQAGDDFMTKASVALSFFDTALANADLDVLDTLEKNPYFSAAIRMAKIQKEHLLSPDVEKALANLREVINAPYDIYTKMRAGDFDMDDFEVDGKTYKNSFVSYENFYQNHENAEIREKAFRSFSKGLRKHQNTAAAAYLAKVKSEKLLADMKGYASVFDYLLAEQEVDRSLFDRQIDLIMTEFGPVAQKFLKHVAQVNGLEKMTFADWKLDIDNDLNPEVSIDGAYDLVMKSLAPLGQEYTKEIERYQTERWVDFAANANKDSGGYAADPYKVHPYVLMSWTGRMSDVYTLIHEIGHSGQFIFSDNHQSYFNTHMSTYYVEAPSTFNELMLSDYLEHQFDDPRQKRFALAHRLTDTYFHNFITHLLEAAFQRKVYTLIEEGGTFGADQLNAMMKEVLTDFWGDAVDIDDDAALTWMRQAHYYMGLYSYTYSAGLVISTAGYLNLKHNPNGAKEWLDFLKSGGSRTPLDTAMLIGADIATEKPLRDTIQFLSDTVDQIISYTEDMSHA

SEQ ID NO: 897 - DNA, 1197 bp, Streptococcus pyogenes
atggcaaaagaaaaatacgatcgtagtaaaccccacgttaacattggtacaatcggacacgttgaccatggtaaaactactttaacagctgcaatcacaactgtattggcacgtcgcttgccttcatcagttaaccaaccaaaagattacgcttctatcgatgctgctccagaagaacgcgaacgcggaatcactatcaacactgcacacgttgagtacgaaactgcaactcgtcactatgcgcacatcgacgctccaggacacgcggactacgttaaaaacatgatcactggtgccgctcaaatggacggagctatccttgtagttgcttcaactgatggaccaatgccacaaactcgtgagcacatccttctttcacgtcaggttggtgttaaacaccttatcgtgttcatgaacaaagttgaccttgttgatgacgaagagttgcttgaattagttgagatggaaattcgtgaccttctttcagaatacgatttcccaggtgatgaccttccagttatccaaggttcagctcttaaagctcttgaaggcgacactaaatttgaagacatcatcatggaattgatggatactgttgattcatacattccagaaccagaacgcgacactgacaaaccattgcttcttccagtcgaagacgtattctcaattacaggtcgtggtacagttgcttcaggacgtatcgaccgtggtactgttcgtgtcaacgacgaaatcgaaatcgttggtatcaaagaagaaactaaaaaagctgttgttactggtgttgaaatgttccgtaaacaacttgacgaaggtcttgcaggagacaacgtaggtatccttcttcgtggtgttcaacgtgacgaaatcgaacgtggtcaagttattgctaaaccaagttcaatcaacccacacactaaattcaaaggtgaagtatatatcctttctaaagacgaaggtggacgtcacactccattcttcaacaactaccgtccacaattctacttccgtacaactgacgtaacaggttcaatcgaacttccagcaggtacagaaatggttatgcctggtgataacgtgacaatcaacgttgagttgatccacccaatcgccgtagaacaaggtactactttctcaatccgtgaaggtggacgtactgttggttcaggtatcgtttcagaaatcgaagcttaa

SEQ ID NO: 898 - protein, 398 aa, Streptococcus pyogenes
MAKEKYDRSKPHVNIGTIGHVDHGKTTLTAAITTVLARRLPSSVNQPKDYASIDAAPEERERGITINTAHVEYETATRHYAHIDAPGHADYVKNMITGAAQMDGAILVVASTDGPMPQTREHILLSRQVGVKHLIVFMNKVDLVDDEELLELVEMEIRDLLSEYDFPGDDLPVIQGSALKALEGDTKFEDIIMELMDTVDSYIPEPERDTDKPLLLPVEDVFSITGRGTVASGRIDRGTVRVNDEIEIVGIKEETKKAVVTGVEMFRKQLDEGLAGDNVGILLRGVQRDEIERGQVIAKPSSINPHTKFKGEVYILSKDEGGRHTPFFNNYRPQFYFRTTDVTGSIELPAGTEMVMPGDNVTINVELIHPIAVEQGTTFSIREGGRTVGSGIVSEIEA

SEQ ID NO: 899 - DNA, 1227 bp, Streptococcus pyogenes
atgtatacatataaaatcggaatatctcctgaagaacatgatcagtttgtcttagcacagccacaagctggcttacttcaaagttcaaagtggggaaaagtcaaagataactggaaacacgaacgcatcagcttttatgaaaatggggtacaagttgctgctgctgcttgtttaatcagaaaacttcctcttggtttcactatgatttatatcccacgtgggccaatcatggactacgccaattttgaactccttgatttcgtcattaaaacgctcaaaactttcggaaaaagcaaacgagcgctttttatcaaaattgatccaagtttagtcatcaaacaaactttagaaggaaaagagagcaaagaaaatgatgtgacactctctattattgcttttctaaaaaaactcggtgtcgaatggtctggcagaacaaaagaactcgaagacactattcaaccaagaatacaagccaacatctacgccaaggattttgactttgacagcctgcccaaaaaagccaagcaatccattcgtaccgctaccaataaaggtgttaatgtcacgattggtggcagtgaattgctagacgacttttcagccttgatgaaaaaaaccgagaatcgaaaaggcattatccttcgaggcaaatcctattatcaaaaattactaggtatttatgctggtcagtcctacattactatggctagtttagacttacctgaacaaaaaaaactcttgatccaacagttggacaaggccttagcagaacaagcacgattaacagataagagtaaacctagcaaagtagcagaaaatcaaaaaaccattgcacggctacaaaaagatttaaccattttaagcgagcagctcgctacaggccaaacccgtatcccattagccgccaccctaaccttgatttatggcgagacttctgaaaatctttatgcgggaatggacgatgattatcgcaattatcaagctcctcttttaacctggtatgaaacggctaaagaagcttttaaaagaggctgccgctggcataatttaggaggtgtggaaaatcaacaagatggtggactctatcatttcaaagctagactcaaccccactatcgaagaatttgcaggtgaattcaacattcctgtcggccttgtttcaagcttagccatcttaacctataacttaagaaaaaaattaaggagcacaactaatggcactaattga

SEQ ID NO: 900 - protein, 408 aa, Streptococcus pyogenes
MYTYKIGISPEEHDQFVLAQPQAGLLQSSKWGKVKDNWKHERISFYENGVQVAAAACLIRKLPLGFTMIYIPRGPIMDYANFELLDFVIKTLKTFGKSKRALFIKIDPSLVIKQTLEGKESKENDVTLSIIAFLKKLGVEWSGRTKELEDTIQPRIQANIYAKDFDFDSLPKKAKQSIRTATNKGVNVTIGGSELLDDFSALMKKTENRKGIILRGKSYYQKLLGIYAGQSYITMASLDLPEQKKLLIQQLDKALAEQARLTDKSKPSKVAENQKTIARLQKDLTILSEQLATGQTRIPLAATLTLIYGETSENLYAGMDDDYRNYQAPLLTWYETAKEAFKRGCRWHNLGGVENQQDGGLYHFKARLNPTIEEFAGEFNIPVGLVSSLAILTYNLRKKLRSTTNGTN

SEQ ID NO: 901 - DNA, 996 bp, Streptococcus pyogenes
atgcagcgcaaagtaaccatcaaagatattgctgaattagcgaaaacttcaaaaacaacagtttctttctacttaaatggcaggtttgacaagatgtctgaagaaactaaaaaccgcatcagcgagagtatcaaagctactaattataaaccgagcattgctgctagaagtctcaatgcaaaatcgactaaactcattggtgttgttataggtgacatcacaaacagtttttcaaaccaaattgtcaaaggaattgaaagcaaagcccaggaatttggttaccaaattatcatcggaaacagcaactacgacccttctcgcgaagatgaactcattgaaaagatgctcaatcttggtgttgatggttttattattcaaccaacttctaactttagaaaatattcacgtattatcgatattaaaaaaaagaaggttgtcttttttgatagccaactttacgaacatcgcacaaactgggtcaaaactaataattatgatgctgtttatgataccattcaacaatgtatcgataaaggttatgaacattttatcatgatcacgggtaaccccaatttacttagcactcgtattgaacgcgcttcaggcttcattgatgtgttagaagctaatcatcttactcatcaagaaatgattattgatgaaaatcagacttcttcagaggcaattgctcagtttttgcaaggatcactgactaaaaagagtttggtttttgtccccaattgttgggctcttccaaaagtatttacagctatgaagtctcttaaatttaatataccagagattggactagtaggatttgataacattgagtggacaaaattttcttcaccaacactaacaactattatccaacccgcctatgaagaaggcgaacaggctactaagattttaatcgatgatattgaaggtcacagtcaagaagccaaacaacaaatttttgactgtcaagtcaattggcaagaatcaactttttaa

SEQ ID NO: 902 - protein, 331 aa, Streptococcus pyogenes
MQRKVTIKDIAELAKTSKTTVSFYLNGRFDKMSEETKNRISESIKATNYKPSIAARSLNAKSTKLIGVVIGDITNSFSNQIVKGIESKAQEFGYQIIIGNSNYDPSREDELIEKMLNLGVDGFIIQPTSNFRKYSRIIDIKKKKVVFFDSQLYEHRTNWVKTNNYDAVYDTIQQCIDKGYEHFIMITGNPNLLSTRIERASGFIDVLEANHLTHQEMIIDENQTSSEAIAQFLQGSLTKKSLVFVPNCWALPKVFTAMKSLKFNIPEIGLVGFDNIEWTKFSSPTLTTIIQPAYEEGEQATKILIDDIEGHSQEAKQQIFDCQVNWQESTF

SEQ ID NO: 903 - DNA, 1908 bp, Streptococcus pyogenes
atgttttttgccttcgcacgctttaaagaaacagtcaatccagacttttgcaggaattacctgctagactatcagactgacagctatgctgatcaaaaaagaatagctgacctactcttaaccaatacctttttatttgaagataattgggatatggagccctgccacatcccttaccacttagatcccattacttggcaagaggctgtcatagatgatcctgagtggaactttatgttaaatcgacagacctatctccaaaaattaatcctcgtctaccttgttgaaagagatgaacggtatctcttaacagctaaaggtttcatcctcaattggattgaatcagctattcctttagaccctaaggggttagctactagaaccttagatactggcatccgttgttttgcttgggtcaaatgtttgatttaccttaatctttttaacgccttaaccaagcaagaggaaagcctcatcctagcttccctggaaaaacaacttcaatttctccatgccaactaccttgataaatacagcctcagcaattggggaatcttgcaaaccactgcgattttattagctgatgcctactttggttctgaccttgatattgctgcagcaacagctttcgctagaaaagaattgacgcaacaaatcgcactacaaattctcgaagacggcagtcaatttgaacaatcaaccatgtatcatgtggaagtactcaaagcccttctggaattaactgctctagtccctgattatcttccacagcttagacctactttgcttgccatgagtgattatctcctcaaaatgactggtccagatcataaacaaatccctcttggtgatagcgatgttacagataccagagatattctaacgcttgcagccactatccttgaagaaccacacttaaaagctgctgcttttcccacacttgatatcgatagtcttctccttctaggagaaaaaggtgtccacacttttgaacagttacccgtccaaaccttaccaacttttgcgcatcactttgaacattccgggcacattaccatcaatcaagaaaattattatctttttttcaaaaatgggcccatcggtagttcccatacccatagcgaccaaaatagtctctgtctctattataaaggacaaccacttttctgtgatgctgggcgatacacttacaaagaagaaccattacgctatgccctaaaaagcgctagccatcattctaccgccttcttagaagaacaattacctgagcagattgatagctcctgggcttacctttcttaccccaaatccaattattgtcaccttcgacaaaatggacacgtttactttattgaaggtagctaccagacgcaattctctgataggaacaactaccaacatgaccgacaaattctcatcttaccaccaggaatttttcttatcattgatacgatacaggctcaaggcaaccactgtcttgtcagtcaatttattcttgataatcacttagacgtaaagacagatcaccttagtgacctcagactaatcagtgactgccctttcactatcgaagaaacgattttgtcaaaaaaatacaaccaatacctgactagtcacaaactcatcaaacgaaaaccctttaaagacaagggttgcaccagtaccctattagtccctgacgataccaaagttactcccttaacaccacttcaaacaggcaaacgcaacccaattgagactgccctttcctggcatttaaaaggaaagcagtttgactacagtatctgtgttctccaagaggatttaattaaaggagaaaaactagttctcctaaatagtcataaaatcagaggaaaggtggttgttatcaaccatatcacgaatgagattattcgattgaaacactaa

SEQ ID NO: 904 - protein, 635 aa, Streptococcus pyogenes
MFFAFARFKETVNPDFCRNYLLDYQTDSYADQKRIADLLLTNTFLFEDNWDMEPCHIPYHLDPITWQEAVIDDPEWNFMLNRQTYLQKLILVYLVERDERYLLTAKGFILNWIESAIPLDPKGLATRTLDTGIRCFAWVKCLIYLNLFNALTKQEESLILASLEKQLQFLHANYLDKYSLSNWGILQTTAILLADAYFGSDLDIAAATAFARKELTQQIALQILEDGSQFEQSTMYHVEVLKALLELTALVPDYLPQLRPTLLAMSDYLLKMTGPDHKQIPLGDSDVTDTRDILTLAATILEEPHLKAAAFPTLDIDSLLLLGEKGVHTFEQLPVQTLPTFAHHFEHSGHITINQENYYLFFKNGPIGSSHTHSDQNSLCLYYKGQPLFCDAGRYTYKEEPLRYALKSASHHSTAFLEEQLPEQIDSSWAYLSYPKSNYCHLRQNGHVYFIEGSYQTQFSDRNNYQHDRQILILPPGIFLIIDTIQAQGNHCLVSQFILDNHLDVKTDHLSDLRLISDCPFTIEETILSKKYNQYLTSHKLIKRKPFKDKGCTSTLLVPDDTKVTPLTPLQTGKRNPIETALSWHLKGKQFDYSICVLQEDLIKGEKLVLLNSHKIRGKVVVINHITNEIIRLKH

SEQ ID NO: 905 - DNA, 822 bp, Streptococcus pyogenes
atgactggatctaataaattaaccaagaaagattacctcaaaacagctctgagagctttcttcctacaaaatgggtttaattacaataattaccaaggtatcggatacgccaatgtcatctatcctgccttgaaaaaacattttggcaatgataaaaagggcttatatcaagctttagaagataactgtgagttttacaatactaatcctcacttccttcctttcatcaccagtctgcacttggtcatgttagaaaataatcgccctgaagaagaaacccgaaacatcaaaatggcacttatggggcctttagctggtatcggtgactccttatcacaattttgcttggcgccactcttttcaacgattgcagcttccttagctagtgatggtctggttttgggaccaatcctcttcttcctagccatgaatattatcctaaccgctattaaaattggttctggactctatggctacaaggtcggcacaagctttattgataaattaagtgaacaaatggcggttgtgtcgcgcatggcaaatattgtcggcgttaccgttatcgctggactagcagctacttctgttaaaattactgttcccattacttttgccgctggcaaggtggatgcggccaatacagcacaaaaatttgtgactattcaaggaatgcttgataagattgcccctgcacttttaccagctctctttaccttactcatgtattaccttattaaaaacaaaaaatggacaacctacaaattggtcattttaactgttatcattggtgttattggcagttggttgggtattttagcttaa

SEQ ID NO: 906 - protein, 273 aa, Streptococcus pyogenes
MTGSNKLTKKDYLKTALRAFFLQNGFNYNNYQGIGYANVIYPALKKHFGNDKKGLYQALEDNCEFYNTNPHFLPFITSLHLVMLENNRPEEETRNIKMALMGPLAGIGDSLSQFCLAPLFSTIAASLASDGLVLGPILFFLAMNIILTAIKIGSGLYGYKVGTSFIDKLSEQMAVVSRMANIVGVTVIAGLAATSVKITVPITFAAGKVDAANTAQKFVTIQGMLDKIAPALLPALFTLLMYYLIKNKKWTTYKLVILTVIIGVIGSWLGILA

SEQ ID NO: 907 - DNA, 1002 bp, Streptococcus pyogenes
atgtctaagttattattggttggtgaaccgctgattcgcgttagccccaatcagtttcagcctttgaccaatgcctgcgaggctcagctttttttcggcggttcagaagttaatattgcaagaactctaggcggttttggcttagaagcaaggctatttacggccctaccagataatcctgttggtcacgcttttcatcagtttttgaagcaaagcggcgtggatatgtccttgacggcttggcaaggtcatcgcgttgggctatattaccttgaaaatggctttggctgtcgggctagtcaggtttattatgaccgctgtggctctagcttttcggccttagataaggatagtcttgatttagctgccatttttgaaggcattagtcactttcattttagtgggatcagtttggcgttgggcaaaaaaactcaggacctgattgaggtacttgtgagagaagctaagaaaagggatatttgtatttcctttgaccttaactttagatctagtatgattgccgtagctgatgctaaacgactcttttctcactttgctcaatacgcggatattatttttggcatggaacctttgctgttagacagtgacgattttgacatgtttgatagaaaaaaggcagatactacgacgattagagaacgtctggcaggactttatcagcgctatcagttacaagctatttaccatacggagcgttcaaatgatgcccaaggcagtaatcatttcaaagcttatgcctatgataggcagttttacgaatcctgtgaagtgacgaccccagtcttgcaacgggttggaagtggagatgcttttgtggcgggtttactttatcagttgttagaaggtaacgaaaagcagcgcaaccttgattttgctgtggcaacagctagcctaaaatgtacagtagctgaagatcagctctatcacagtgtccaacaagtagaagcagtcttagctaatcaacgagatatccagaggtga

SEQ ID NO: 908 - protein, 333 aa, Streptococcus pyogenes
MSKLLLVGEPLIRVSPNQFQPLTNACEAQLFFGGSEVNIARTLGGFGLEARLFTALPDNPVGHAFHQFLKQSGVDMSLTAWQGHRVGLYYLENGFGCRASQVYYDRCGSSFSALDKDSLDLAAIFEGISHFHFSGISLALGKKTQDLIEVLVREAKKRDICISFDLNFRSSMIAVADAKRLFSHFAQYADIIFGMEPLLLDSDDFDMFDRKKADTTTIRERLAGLYQRYQLQAIYHTERSNDAQGSNHFKAYAYDRQFYESCEVTTPVLQRVGSGDAFVAGLLYQLLEGNEKQRNLDFAVATASLKCTVAEDQLYHSVQQVEAVLANQRDIQR

SEQ ID NO: 909 - DNA, 939 bp, Streptococcus pyogenes
atggttacgatgattagatactttttccgtcatatttgggaatccattaaaaatcttaaacgcaacttttggatgacatttgcttcagttagtatggtggctgttacattgactttagttggtgtttttgcggcgacattgttgaatatacagcgtgttgcttcgggtgttgaaaataatgtccatatcaatacctacttacaagttgattcaactgatgctgcaaaagttattcaaaatactgccggtgaacctgttaataacgataactaccacagtgtttacgacaaaattgctcagataaaaggtgtcaaaaagattacattttctagcaaggatgaacaattgaaaaaattgcaagaaaccttaggtgatgtttggaatatgtatgaccaagacactaatccgctccaagatatctatcttattgagacccagacgcctaaacaagttaaggcgatcactaaaaagatcagaacgattgaaggcgtagaagccgcagattatggagggattaactccgataaactatttaagttttcaacattaattcaaacttgggggctgatcggaacagcaatgctattatttgtagctgtctttctcatttcaaacactattcgtatgactattatgtctcgtaaacgtgacattgaaattatgcggttagttggtgctaaaaattcttatattcgagggcctttcttttttgaaggggcttgggttggcttgttaggagctgttttaccatctcttctgatttattatggatatgatcttgtttataagcattttgcacaagaattacaacgtaataatctctcgatgtatccgcttgatccttatgtatattacctgattggtgctttgtttgtcataggtattatgattggttcgcttggttcagtgctttctatgagacgttatttaaaattctaa

SEQ ID NO: 910 - protein, 312 aa, Streptococcus pyogenes
MVTMIRYFFRHIWESIKNLKRNFWMTFASVSMVAVTLTLVGVFAATLLNIQRVASGVENNVHINTYLQVDSTDAAKVIQNTAGEPVNNDNYHSVYDKIAQIKGVKKITFSSKDEQLKKLQETLGDVWNMYDQDTNPLQDIYLIETQTPKQVKAITKKIRTIEGVEAADYGGINSDKLFKFSTLIQTWGLIGTAMLLFVAVFLISNTIRMTIMSRKRDIEIMRLVGAKNSYIRGPFFFEGAWVGLLGAVLPSLLIYYGYDLVYKHFAQELQRNNLSMYPLDPYVYYLIGALFVIGIMIGSLGSVLSMRRYLKF

SEQ ID NO: 911 - DNA, 231 bp, Streptococcus pyogenes
atgacaatcaatttgaagcgactaaaagccgagcgaattgctagcggtatgacacaatgtgaagttgcacaatctatggggtggaaaacacgaacaccatatgcaaaaagagagaacggtattgtttcaattggagctgatgagcttgcaaaaattactttgatttttggattaccaatcgaaaaaatagcaattttttttgataaagacgttcccgtaatggaacgatga

SEQ ID NO: 912 - protein, 76 aa, Streptococcus pyogenes
MTINLKRLKAERIASGMTQCEVAQSMGWKTRTPYAKRENGIVSIGADELAKITLIFGLPIEKIAIFFDKDVPVMER

SEQ ID NO: 913 - DNA, 1320 bp, Streptococcus pyogenes
atgtcaataacaataaacaaacttgaaatcgaaaacgttaagcgtattaaagcggtaaagattgaaccatctgcaacaggcttgaccattatcggtggtaataataaccaaggcaaaacaagcgtattagatgctattgcttgggcactaggcggtaataaatacaagcctagtcaagctatgcgcgaaggatcgcaagtgccacctacgcttaaaattaccatgtcaaatggacttattgttgaacggaaaggcaaaaatgccagtcttaaagtaattgatccaaacggccaaaaaggtggtcagcagttgctagatagctttgtagaagaattggctattaacttgccgaaatttatggatagtacaccaaaagagaaagcagatgtcttgcttgaaattattggtgtcggtgatcagctagcagagttagagctaaaagaaaaagaaatatacaatcaacgtcacgctatcggtgttatagcagaccaaaaagaaaagtttgctaaggagatgacatattatcctgacgcacctaaacaactggtaagtatttctgagcttatccaacaacaccaagctatcttagccaaaaacggagagaatgctcaaaagcgtcaaaatgtagaacgtattcgctatgattataatcaatctatcttggaagttgaccgtttacgcaagttattagcagatgcagaagctaagacgaataagttaagcgaggatttaaaaatagcaaatactgacgctatggatttacatgatgaatcaacagctgaaatcgaggcgaatattgccgatattgatgaagtcaaccgcaaagtgcgcgctaactttgataaagataaagctgaagaagatgctaaacagcagcgtgaacaatataacatattgactaatgatattgagtcaattcgtcaacaaaaaagagacttattgattaatgcagatttgccgcttgaaggcttatcagtagatgatggaaagttactttaccttggtcaagagtgggataacatgtcaggcagccaacaactaatagtagcaactgctattgtacgtaaactaaaaccagattgtggctttgttttgattgataaactcgaacagatggacaacatcacacttgaacaatttggtaaacggctagagcaggagggtttgcaagctattgcaacccgtgtatcaattggtgaagagtgtgccatcattatagaagatggatactcagtggaaaacaaagctcataactttaaaacagcagagggtggtaattttgctgaaacagtagcaccgacttggaaaggtgagttttag

SEQ ID NO: 914 - protein, 439 aa, Streptococcus pyogenes
MSITINKLEIENVKRIKAVKIEPSATGLTIIGGNNNQGKTSVLDAIAWALGGNKYKPSQAMREGSQVPPTLKITMSNGLIVERKGKNASLKVIDPNGQKGGQQLLDSFVEELAINLPKFMDSTPKEKADVLLEIIGVGDQLAELELKEKEIYNQRHAIGVIADQKEKFAKEMTYYPDAPKQLVSISELIQQHQAILAKNGENAQKRQNVERIRYDYNQSILEVDRLRKLLADAEAKTNKLSEDLKIANTDAMDLHDESTAEIEANIADIDEVNRKVRANFDKDKAEEDAKQQREQYNILTNDIESIRQQKRDLLINADLPLEGLSVDDGKLLYLGQEWDNMSGSQQLIVATAIVRKLKPDCGFVLIDKLEQMDNITLEQFGKRLEQEGLQAIATRVSIGEECAIIIEDGYSVENKAHNFKTAEGGNFAETVAPTWKGEF

SEQ ID NO: 915 - DNA, 1584 bp, Streptococcus pyogenes
atgcagcttagaccttaccaagaagaggcaaggtcagcagtgcaacacgagtgggaagacggcaagaagagaactcttcttgtccttccaactggttgcggtaaaactattgtcttttcgaaaattatcgaagaccgtgtaaggctcggagagagagttttggttctggctcataggtccgaacttttagaacaggctagtgataaattgatgacagcaactggattagggacagcattagaaaaagcagagaatacttctttagggtcatggttcagggttgtagttggatcagttcaaacgatgcagagagagaagcgtttgagtaagtttcctacaaatcattttgacacaattattattgatgaagcccatcatgccatctctgatggttaccaaagagttttgcaacactttgatagtagcaatgttttgggagtgacagcgacaccagatcgcggtgacaaacaaaatctaggtaagtatttcgatagtttagcttatgaatattccttagtagatgccatcaagtctggttacttatctaaaattaccgcagttactatcccgttgactttggacttatctacagttagtcagcaagctggagattttaaagcaagtgagattgggacggcgcttgacccgtacctagaacaaattgccgatgaaatggtgaagcaatgcgcaaaccgtaaaacagttgtatttcttccgcttgttaaaacttcccaaaaatttcgtgatattctaaaccaaaaaggatttaaagcagcagaggtcaatggggaatcgaaagaccgcgctgaagtcctagaagactttgataatgataaatataatgtactatgcaattcaatgcttttaacggaggggtgggattgcccgacagtcgattgcgtagttgtactgagacccacaaaagtaagagctctttatagtcaaatggttggtcgtggcacacgattagcgccggggaaagaaaatctactattattagattttttatggcataccgaacgccatgaactttgtcgtcctgctcatctaattgcaaagacaccagaagttgctcaaaaaatggtcgataacatgacagaggaaactgaagtaacctttgaattgttagaagctgaagaagtagctagcaaagatgttgtcgcagaacgagaagaagcactcgctaagcagttagcagaaatgcgtaagcgtaaacgtgcattagttgatccgttgcaatttgaaatgtctatcaatgctgaagacttagtggactatgtaccagaattcggctgggaaatggctcctgtttctgataaacaaaagaacgctttagaaaaatttggtatttttaccgacgacattggaaatgcaggtaaagctactaaattattggagcgattggccaagaggagagaaactggcctaacaacacctaaacaaatcagaatgctagaacgatacggatttaaaaacgttggaatgtggaaatttgaagtagcatcaaacatgattaaccgcattgctgctagcggatggcgcctaccaaaaggcatcaatgctcgagaataccaacctgaatag

SEQ ID NO: 916 - protein, 527 aa, Streptococcus pyogenes
MQLRPYQEEARSAVQHEWEDGKKRTLLVLPTGCGKTIVFSKIIEDRVRLGERVLVLAHRSELLEQASDKLMTATGLGTALEKAENTSLGSWFRVVVGSVQTMQREKRLSKFPTNHFDTIIIDEAHHAISDGYQRVLQHFDSSNVLGVTATPDRGDKQNLGKYFDSLAYEYSLVDAIKSGYLSKITAVTIPLTLDLSTVSQQAGDFKASEIGTALDPYLEQIADEMVKQCANRKTVVFLPLVKTSQKFRDILNQKGFKAAEVNGESKDRAEVLEDFDNDKYNVLCNSMLLTEGWDCPTVDCVVVLRPTKVRALYSQMVGRGTRLAPGKENLLLLDFLWHTERHELCRPAHLIAKTPEVAQKMVDNMTEETEVTFELLEAEEVASKDVVAEREEALAKQLAEMRKRKRALVDPLQFEMSINAEDLVDYVPEFGWEMAPVSDKQKNALEKFGIFTDDIGNAGKATKLLERLAKRRETGLTTPKQIRMLERYGFKNVGMWKFEVASNMINRIAASGWRLPKGINAREYQPE

SEQ ID NO: 917 - DNA, 396 bp, Streptococcus pyogenes
atgattgaattttttttgcctatggataaaatcccgacgacaactcatcagcaaaagaaagtgactgtcataaatggcaagcctcacttttacgagcctgagagtttgaaaaatgctagggataagtttacaagtcttttggctcagcatgtaccacccagtaagttagatggtcctatccgtctgacagtcaagtggctatttcccaaaatcaagggcagcacaaacggacagtacaaaacgacaaaaccagataccgacaacctgcagaagctgcttaaagactgcatgaccgaattgggattttggaatgatgatgcgcaggttgcttcggaaattattgagaagttctgggctgatacagtaggaatatacgtaaaggtggaagagttatga

SEQ ID NO: 918 - protein, 131 aa, Streptococcus pyogenes
MIEFFLPMDKIPTTTHQQKKVTVINGKPHFYEPESLKNARDKFTSLLAQHVPPSKLDGPIRLTVKWLFPKIKGSTNGQYKTTKPDTDNLQKLLKDCMTELGFWNDDAQVASEIIEKFWADTVGIYVKVEEL

SEQ ID NO: 919 - DNA, 228 bp, Streptococcus pyogenes
atgaaattaaaaagtattttaaatgatagtcaaatcgattttgtcaaaaatgaacttccgggattacctgtggatatagatgttaattccgaaaagtatgatgttttttgtgaaggtatagagacttactaccagacagaaagctttgatgaaaagtacaatataacagctaaaggtaaactagctgagagtattattgatttactgactgataaaggttattggtga

SEQ ID NO: 920 - protein, 75 aa, Streptococcus pyogenes
MKLKSILNDSQIDFVKNELPGLPVDIDVNSEKYDVFCEGIETYYQTESFDEKYNITAKGKLAESIIDLLTDKGYW

SEQ ID NO: 921 - DNA, 333 bp, Streptococcus pyogenes
atgatcgataaaagactgcttattgacgaactgcaggtaaaacttgtcaaagataaaggtgattatggagggtttgtctatgacgaaccttttacactctctcccgttaggtttgaccgtaatcttgcaaccgcaggtaaagataatgcaaggcaagagactaagccgtcggttatctttatttatcctaaatactgtaagacagtagccgataggtcatgggttgatgctgttgtcattgatggtgatactgagtacaccgttgataaagtgataccagtctaccacccactaacaaacaaaattttttgttttgaagtggaggttatctaa

SEQ ID NO: 922 - protein, 110 aa, Streptococcus pyogenes
MIDKRLLIDELQVKLVKDKGDYGGFVYDEPFTLSPVRFDRNLATAGKDNARQETKPSVIFIYPKYCKTVADRSWVDAVVIDGDTEYTVDKVIPVYHPLTNKIFCFEVEVI

SEQ ID NO: 923 - DNA, 3261 bp, Streptococcus pyogenes
atggcagctgatggtaaggtaacgatacttgttgacgttgatggtaagcaggtaaaggtactcaatagtgagttagataaagttgccaagcacggtgacaaaggcagctcctctcttaaaaaatttgcggttggtgcaggagtctttaaattagcttcggctgcagttgatttggttagtcaatctcttggcaaggctatcacaagatttgacacgcttgaaaaatatccaagggtcatgaaagctatggggcatagcgctgagtatgttgctagatcaactgataagttagcgaacggaattgatggactaccaacaactttagacgaggttgtcggaaccgctcaacgtttgacctctattactaaggatatcaataaatcaactaatctcacactagcattaaataatgcctttttagcttcaggagcttcatcagaggctgcaagccgagggctggagcagtatgcccaaatgctatcagctggtaaggttgatatgcaagcttggaaaaccctccaagaaacaatgccttatgccttgcaacaaactgcggaagcttttggatttgcaggggcatcagctcaaaaggatttttatgaggcattaaaaaacgggcaaataacatttgaccaattttctaataagttgattgagttaaatgatggtgtcggcggttttgcagaactagccaaagaaaatagtaaagggattgaaacctcttttaacaacatcaagaacgctattgcaaaaggtgtggccaacagcattaaggctttggatgatttatctaaggctgcaacaggtaagggcatagctgatcattttgatagtttgaaagttgttatcaatgcctcttttagcgccatcaatgcaagtattaaagctagtacatcgctatttaaacttttgtttagtgttattggtgctggaatatcagtcgtcaaagctctgtcgcctgccttagttggtgtagcatctggtctagctgccatgagggcagttaatgagactataacaatgattaaagcgctaaatagagcttgggttatggcatctgcatcaatgagtattggagcaacaaccattaagactgtgactgcggtacaagcggtaagtaccacgatgactaaagcagatatggttgcaagactatctcagttaggtgtcttaaaagccagtaccgtgatttatggtgttatgacaggcgctatcagtttatctactgctgcaaccatagccagtactgctgcggtaactgcgttaaaagcagcacttgtagccttaacaggtcccgttggttgggtagttggagctatcggtgctttagttgctgtcggagtaagcttatggtcatggctaactaaagagtcagacgagaccaaaaagctgaaaaaagagcaggaggggctagtcgaaagcaacaaacagctaagagattctgtccgtgagggcgtgcaagagcgtaagaagggccttgagtccgtcaaagagagcactgcagctcatcaaaaattagctgacgaaatcattaagttagccgccaaagaaaacaaaactgcaggcgaaaaacaaaacttaaaaaataagattgatcagcttaatgggtctattgatggcttaaacttggcctatgacaaaaactccaattctctttctcacaatgcagatcaaattaagtcacgcattagtgccatggaagcagaaagcacatggcaaacagcacaacaaaacctgttaaatattgaacagaaacgtagtgaggttagtaaaaagctagctgaaaatgccgagctacgtaaaaagtggaatgaagaagctaacgtctccgactctgtccgaaaagaaaagattgccgaactcacagaagaagagggtaagcttaaaaatatgcagactcaattgcaggaggagtataacaagacatcagctactcaacaagctgctgcagacgctatggctgccgctgaagaatcaggatcagcaagacaggttatagcgtacgaaaatatgtcagaagctcaacgaactgccatagacaatatgcgcactaagtactctgaacttttagagacaacgacatctatttttgatgctatcgaacaaaagactgctctgtcagtggagcaaatgaatgccaaccttgaaaaaaatagagctgctactgaacaatgggctacgaatttggaaattttagctcagcgtggtgtagaccaaggcatcttggaacagcttaggcggatgggacctgagggggcaacacagacacaggtttttgtggatgccacagatgccgagctagcacccttgcaggaaaactttagagcagccacagaaactgctaaaaatgcaatggggagcgttttagactcagcaggtgtggaaatgccagaaaaagttaaagggatggtcactaatgtttctacgggattacaggcggaactgcaagctgctaactttgctcaacttggtcaagaaatccctaatggggtttctcaaggtataagtcaaggggcaggtaaagcaagtgacgcaagtgtcaaaatgggtcaagaagttaaacgctctttccaaggagagttgggtatccactcgccatcgcgagtatttactgagtacggtggccatattactgatggcttgagtaatggtgtgacaaatggaacgtcaaaagttatgcaaaccatgcagagcttggctcaacagatgtctcaaaaaggacagcagattgttaatgacatgcgtagcaagtcgaaccaaatcacagatgcttttagcacgatgagtggtccaatgcactctcatggtgttaatgccatgcaaggtttggccaatggtatttatgcagggtcgggggcagctttagcggcagctcaaagcattgcggcacgtatcaccgcaacaattcaaagtgccttagatatccactcgccatctcgtgttatgagggatgaggttggacgttttatccctcagggtatcgctgtaggtattgatgcggatagaaaagtcattgactcatctatgcaaaagctaaaagagtcaatgacgattaatgcgaccccagaaatagcctctggatttggcggaggagttgcggggattgctaatcagaccacaaataactcaaataacagttttacccttaatgtcaaggttgatgaatccgacggtaatagccgcgagaaatatcaacgcttattcagagaatttagctggtatattcaacaacaacaaggaaggttaggtgatgttaaatga

SEQ ID NO: 924 - protein, 1086 aa, Streptococcus pyogenes
MAADGKVTILVDVDGKQVKVLNSELDKVAKHGDKGSSSLKKFAVGAGVFKLASAAVDLVSQSLGKAITRFDTLEKYPRVMKAMGHSAEYVARSTDKLANGIDGLPTTLDEVVGTAQRLTSITKDINKSTNLTLALNNAFLASGASSEAASRGLEQYAQMLSAGKVDMQAWKTLQETMPYALQQTAEAFGFAGASAQKDFYEALKNGQITFDQFSNKLIELNDGVGGFAELAKENSKGIETSFNNIKNAIAKGVANSIKALDDLSKAATGKGIADHFDSLKVVINASFSAINASIKASTSLFKLLFSVIGAGISVVKALSPALVGVASGLAAMRAVNETITMIKALNRAWVMASASMSIGATTIKTVTAVQAVSTTMTKADMVARLSQLGVLKASTVIYGVMTGAISLSTAATIASTAAVTALKAALVALTGPVGWVVGAIGALVAVGVSLWSWLTKESDETKKLKKEQEGLVESNKQLRDSVREGVQERKKGLESVKESTAAHQKLADEIIKLAAKENKTAGEKQNLKNKIDQLNGSIDGLNLAYDKNSNSLSHNADQIKSRISAMEAESTWQTAQQNLLNIEQKRSEVSKKLAENAELRKKWNEEANVSDSVRKEKIAELTEEEGKLKNMQTQLQEEYNKTSATQQAAADAMAAAEESGSARQVIAYENMSEAQRTAIDNMRTKYSELLETTTSIFDAIEQKTALSVEQMNANLEKNRAATEQWATNLEILAQRGVDQGILEQLRRMGPEGATQTQVFVDATDAELAPLQENFRAATETAKNAMGSVLDSAGVEMPEKVKGMVTNVSTGLQAELQAANFAQLGQEIPNGVSQGISQGAGKASDASVKMGQEVKRSFQGELGIHSPSRVFTEYGGHITDGLSNGVTNGTSKVMQTMQSLAQQMSQKGQQIVNDMRSKSNQITDAFSTMSGPMHSHGVNAMQGLANGIYAGSGAALAAAQSIAARITATIQSALDIHSPSRVMRDEVGRFIPQGIAVGIDADRKVIDSSMQKLKESMTINATPEIASGFGGGVAGIANQTTNNSNNSFTLNVKVDESDGNSREKYQRLFREFSWYIQQQQGRLGDVK

SEQ ID NO: 925 - DNA, 723 bp, Streptococcus pyogenes
atgccaaaagaacaaccactctatctacagattgttgatgacttggaagtgaaaatcaaaaaaagcatgacagaaaacgataagttgttgtcagaacgagaattaagtgacctttacggtgttagtcgtatcacgattagactgactcttaaggaattggaattacgagacttaatttataaaaagcagggcaaggggacttatgtttcaggaatcaaagaacctgccactgatttatcaagtacttacagctttacagagcagatgaaaaaaatggggaaaactcctaaaacagagattctttcttttgaacagtatcaggtaacaccttacttgtctggtctcttagagcttgatcccgatacagaagtttttgaattagaacgcctaaggattgcagatgatatgcccttgatgtttgaacgatcctatattcctgctcagccttttcaggggttaagcattgcggacttaaagcgtaaagctttgtacgatatctttgcaaaggactatcaagaaacaatccgtcttgcagaagaagagttttatgccagcattgccttggactatgaagcaggtctcttaggcattaaaaagggagatcctgtcttacatattattcgtaaaacttataatgataaaaatatcttaattgaattgactttcagcattgcaagggcggatcagtttaggtaccgggtgcaacatcaccctaatggttaa

SEQ ID NO: 926 - protein, 240 aa, Streptococcus pyogenes
MPKEQPLYLQIVDDLEVKIKKSMTENDKLLSERELSDLYGVSRITIRLTLKELELRDLIYKKQGKGTYVSGIKEPATDLSSTYSFTEQMKKMGKTPKTEILSFEQYQVTPYLSGLLELDPDTEVFELERLRIADDMPLMFERSYIPAQPFQGLSIADLKRKALYDIFAKDYQETIRLAEEEFYASIALDYEAGLLGIKKGDPVLHIIRKTYNDKNILIELTFSIARADQFRYRVQHHPNG

SEQ ID NO: 927 - DNA, 1263 bp, Streptococcus pyogenes
atgattaaatcaattgcaacactgcctaaaccttccttgaaagaagtgttaggactagtaggattagcacttcccatagggggcgcggttggagtggttgatgttatttttggcaaagggcttttgtttctttccgaatatcgcgatcaccaccttttcttgcttcttccatttcttgccctagcaggccttgttatcgtttttctttacgataagttaggcaaagaggttcgtcaagggatgggattggtttttcaggtagggcatggtcaaaaaaatcagattcctcctatgctcattcctcttattttgttctcaacttgggtaacccacttatttggagcgagtgcgggtagagaaggggtagccgttcaaataggagctactatctctcattattgtcggagatttgtgactagtcaagaagccgcacgacatcttttgattatggggatggcagccggttttgcagggctttttcaaacgccaattgctgctgtcgtatttgccctcgaggttttattagtaggaacgcttcgttattccgctttattgccttccttagttgctgcttacgtggcttcttggacttcccatgccttgggattagagaaatttacgattgttcttgaagaaacattgaccataactcccttaacattggttaaattaattgggttaggccttatttttggtctggtgggaaatagttttgcctatttacttggctggtttaaaccttacctcagtcaaaagctaccaaatccttatttccggattgcttttatcggtgctttgttatctatctgtctgatgattggtcacgtcggaagatatagtggtctaggaaccaatttgattgcggcagctttttctggccaaactatcctaacttacgactggcttttaaaaatgatcgtgacggtgattagcttatctgcaggctttcaaggtggtgaagtgacgcctctatttgctattggagcttctttaggcatcgttttggccccttacttaggtcttcctgtactgttggttgctgcacttggttacaccacggtatttggaagtgcaacaaataccttttgggcccctatctttattgggatagaggtctttggtccagagaatgccctagcatattttgtcacctcggctgcagcctatatggttagtcacagacattccatttacagttatcaaaaagtagtcatgatcaatttaaaagacatgacggtaaatcagatggatttaaaaaaatag

SEQ ID NO: 928 - protein, 420 aa, Streptococcus pyogenes
MIKSIATLPKPSLKEVLGLVGLALPIGGAVGVVDVIFGKGLLFLSEYRDHHLFLLLPFLALAGLVIVFLYDKLGKEVRQGMGLVFQVGHGQKNQIPPMLIPLILFSTWVTHLFGASAGREGVAVQIGATISHYCRRFVTSQEAARHLLIMGMAAGFAGLFQTPIAAVVFALEVLLVGTLRYSALLPSLVAAYVASWTSHALGLEKFTIVLEETLTITPLTLVKLIGLGLIFGLVGNSFAYLLGWFKPYLSQKLPNPYFRIAFIGALLSICLMIGHVGRYSGLGTNLIAAAFSGQTILTYDWLLKMIVTVISLSAGFQGGEVTPLFAIGASLGIVLAPYLGLPVLLVAALGYTTVFGSATNTFWAPIFIGIEVFGPENALAYFVTSAAAYMVSHRHSIYSYQKVVMINLKDMTVNQMDLKK

SEQ ID NO: 929 - DNA, 561 bp, Streptococcus pyogenes
atgaattatcaagattatatatgggatttgggaggtaccttactcgataattacgagctttcaacccaagcttttgtccaaacgctagcttttttcagccttccaggagatcacgatgctgtttaccaaaaattaaaagaatcaaccgctatcgctgtggcaatgtttgctcctaatgagccagaatttttgcatgtgtataggctaagagaagcagacaaattggcacaacccatttggtgtttgggagctaaagaaattttgggaaagatagcgacttcaggttcgcgaaattttttaatttctcatcgagattgtcaggtgaaccaacttttagagcaagctgggttgctaatctattttacagaagtcgtgacagcttcaaatggctttgctcggaaaccaaatcctgaaagtttgttttatttaaaagaaaagtatgatattaatagtggattagtaattggagatcggctaattgataaacaagcaggacaagcagcgggttttaataccttgcttgttgacggtagaaaaaacctattggagatagtaacgtag

SEQ ID NO: 930 - protein, 186 aa, Streptococcus pyogenes
MNYQDYIWDLGGTLLDNYELSTQAFVQTLAFFSLPGDHDAVYQKLKESTAIAVAMFAPNEPEFLHVYRLREADKLAQPIWCLGAKEILGKIATSGSRNFLISHRDCQVNQLLEQAGLLIYFTEVVTASNGFARKPNPESLFYLKEKYDINSGLVIGDRLIDKQAGQAAGFNTLLVDGRKNLLEIVT

SEQ ID NO: 931 - DNA, 6138 bp, Streptococcus pyogenes
atgcgtaaggtcaaaaaagtctttgttagttcatgtatgcttttaacagtgggcctcggagttgccgtacctactggattcagccaatctaatggcgtgatggttgtaaaggctgcggaagtgccggcgacagatttatcacgtcaggcgtctgattcggagagggtagatgaatcgtctttattgcagaaagaaaacttatcagtagattcatttaaattagaaaatttaaatggatgggaagctgaaaatgatacagcaggtaatttggggaaatttaaagatccagatagttcgggctatcaaaatattttgacatcatctggaaagaatatcagtgtagctgttgctcccaaaggttcaggtaaaatgaacattaaagtaactaaaagatcaaattttcagggtggatattatgtaggtggtcttagaactcaaactccggtattgaagttaaatgatgtttatcgatattcttttacaactaaaaaattatcaggaaattcttcagagttcaaaacgagagttaagcccgttgaatctaataataaactagggaaagagcttgttattagggtggataataaaaatgtatctactaagcatgattggcttccagacatctctgatggaactcatactgtggacttcactggtcttgataaaaaattatctgttgctttcagattttctccaagacaaacttcgaatgttgtttacgaattttctaacataaatataaaaaacattagtcctgcatcagtgccggctattccttcgaaagttttagagggaaccagcgtcttgtcgggtactgcaatatcttctggagatacattagaaaaaagaaaatcgtttgatggcgatatcctaagagtttataaagatagcaaaatcattgctagaacagtaataaaaggcaataagtgggatgttaaactttcaaagcctcttattgcaggtgaaaaattagattttgagattttgcatccgagatctcaaaacgttagtaaaaaaatttcaaaacaagtcgaagctaaaccatttgatccagcttcctataaagaaaaagttatagccaaattaaagccggtttatgaagctactagtgaaaaaatcacaaatgatgcttggttggatgaaaatgcgaaggatttgcaaaaacaaaaattagaagaacaatatatttctggaaaagtagcgatatcagaggctggaactaaacaagaagctatagatgcagcatataataaatattcaagtcaaacagatccagactctcttcctagtcagtataaacaaggtaataaagaaaatgaacaagaaaaagggcgtcaagatttaatccagactcgtgatctgacgttgaaagccattcaagaagacaaatggctaacagagcaggagaaaacaattcaaaaagaagaagcattaaaagcttttgaaactggtatagaaagtgttaatcaaacagtatcattagaacagttgaagcaacggttaatagtgtataaagcttctgaaaaagattcagagaaaaaagaatatcctgagtcaattcctaatcagcatattccagggaaagaaaaagaagttaaagctgctaaacaagaagaacttaaaaaattacatgacacaactcttgaaaaaatcaatcaagataaatggttgacgccagaccaacaagctgaacagttaaaacaagcggaagttacttttaaaaaaggccaagaagcaattaaaagtgctcagactttaactcagcttgagacagacttagctgattatgtttctgagaatgaaggtaagggaaattctattcccgataaatacaaatctggcaataaagatgatttggtaaataaggctgaagttaaacttaaggaagctcacgaagctactaaacaagcaattgaaaaagatccatggttgagtccggaacagaaaaaagctcaaaaagaaaaagccaaagcaagactagatgagggcttgaaagctcttaaagctgcagatagtttagagattcttaaagtgacagaagaagctttcgttgataaagaaaaaaatccagattcaattccaaatcaacataaagctggaactgctgatcaagctagaaaacaagctttagatagtttagataaggaggttcaaaaagagttagagtcaattgataacgataatactctaacaactgatgagaaagcagctgctaagaaaaaagtcaatgacgcttatgatgtagctaagcaaacagctatggaagccaattcttatgaagatttgactactattaaagatgagttcttatctaatttacctcataaacaaggaacgccgcttaaagatcaacaatctgatgctattgcagaattagagaagaagcagcaagaaattgaaaaagctattgagggtgataaaacattaccaagagacgaaaaagagaaacaaattgctgactctaaggaacgcttaaaatctgacacgcaaaaagttaaagatgctaaaaatgctgatgctattaaaaaagcatttgaagaagggaaagtgaatattcctcaagcacatatcccaggtgatttgaacaaggataaagaaaaacttcttgcagaattgaagcaaaaagcagatgatactgaaaaagctattgatgttgataaaactctgacagaagatgagaaaaaagagcaaaaagtcaaaacaaaagctgaacttgaaaaagctaaaactgatgttaaaaatactcagacacgtgaagaactagataaaaaagttccagaacttaagaaagctattgaagacactcacgttaaaggtaatcttgaaggtgttaagaataaggctattgaagatcttaaaaaagctcatactgaaacagttgctaaaataaatggtgatgatacccttgacaaagctactaaagaagctcaagtgaaagaagctgacaaagctttggcagcaggtaaagatgcgatcactaaagcagatgatgctgataaagtaagtacagctgttacagagcacacaccaaaaattaaagcagcacataaaactggtgaccttaaaaaagctcaagtagatgctaacacagctcttgacaaagcagctgaaaaagaacgtggagaaatcaataaagatgctacactaacgacagaagataaagcaaaacaactgaaagaagttgagacagctcttactaaagctaaagataacgtgaaagctgctaagacagcagacgctatcaatgacgcacgtgataaaggcgtagcaacaattgatgccgtccataaagcaggtcaagacttaggtgctcgtaagtcaggtcaagtcgctaaacttgaagaagcagctaaagcaacgaaagacaagatttcagctgatccaactttgacaagcaaagaaaaagaagagcaatctaaagctgttgacgctgaacttaagaaagcgatagaagctgttaacgcagctgacacagctgacaaggttgacgatgctcttggtgaaggtgttacagacatcaagaaccaacacaagtcaggtgactctatcgacgctcgtcgtgaggctcatggtaaggaacttgatagagtcgctcaagaaactaaaggtgcgattgaaaaagaccctactttgacgactgaagaaaaagctaaacaagttaaagacgtagatgccgctaaagaaagaggcatggctaagcttaatgaagctaaagatgctgatgctttagacaaagcttacggtgaaggtgttacagacatcaagaaccaacacaagtcaggtgaccctgtcgacgctcgtcgtggattacacaacaagtcaatcgacgaagtggcgcaagcaactaaggacgctatcacagcagatacgactttgactgaagctgaaaaagaaacacaacgtggcaatgttgataaagaagcaactaaagctaaagaagaacttgctaaggctaaagatgctgatgctttagacaaagcgtacggtgacggtgtaaccagcatcaagaaccaacacaagtcaggtaaaggtcttgacgttcgtaaagatgagcacaagaaagctcttgaagctgttgctaaacgtgtcactgctgaaattgaggctgatccaaccttaacaccagaagtgagagaacaacaaaaagcagaggttcaaaaagagcttgaacttgcgactgataagattgctgaagctaaagatgcagatgaagcagacaaagcttacggtgacggtgtcacagcgatcgaaaatgcccacgttattggtaaaggtatcgaagctcgtaaagaccttgctaagaaagaccttgctgaagctgctgctaagacaaaagctctcattattgaagacaaaacgcttactgatgatcaacgtaaagaacagttattaggtgttgatacagagtatgctaaaggtatcgagaatattgatgcagctaaggatgctgcaggtgttgataaagcatatagtgacggtgttcgtgacatcctggcacagtacaaagaaggtcaaaaccttaatgatcgtcgtaatgctgccaaagaatttcttcttaaagaagcagacaaagtgacgaaactaatcaatgatgatccaaccttgactcatgaccaaaaagttgatcaaatcaacaaagttgaacaagctaagttagacgcaatcaagtctgttgatgatgctcaaacagctgatgctatcaatgatgctcttggtaagggtattgaaaacatcaacaaccaataccaacatggcgatggcgttgatgttcgtaaagcgactgccaaaggcgatcttgaaaaagaagctgctaaagtgaaagctcttattgctaaggatccgaccttaactcaagctgataaagacaaacaaacagcagcggttgacgcagctaagaatacagcaattgcagcggttgataaagcgacaacaactgaaggcattaaccaagaacttggtaaaggcatcacagctatcaataaagcttaccgtccaggtgaaggtgttaaagcacgtaaagaagccgctaaagctgatcttgaaaaagaagctgctaaagtgaaagctcttattactaacgacccaaccttaacaaaagctgataaagctaaacaaacagaagctgttgctaaagcccttaaagctgctatcgcagcggttgataaagcgacaacagctgaaggcattaaccaagaacttggtaaaggcatcacagctatcaataaagcttaccgtccaggtgaaggtgttaaagcacgtaaagaagccgctaaggctgatcttgaaagagaagctgctaaggttcgtgaagctatcgctaacgacccaaccttaacaaaagctgataaagctaaacaaacagaagctgttgctaaagctcttaaagctgctatcgcagcggttgataaagcgacaacagctgaaggcattaaccaagaacttggtaaaggcatcacagctatcaacaaagcttaccgtccaggtgaaggtgttgaagcacataaagaagctgctaaagctaatcttgaaaaagtagctaaagaaactaaagctcttatttcaggagaccgttacttgagcgaaactgaaaaagcagtccaaaaacaagctgttgagcaagctcttgcgaaagcacttggtcaagttgaggctgctaagacagttgaagctgttaagttggcagaaaaccttggtactgtagctatccgttcagcatatgttgctggtttagctaaagatactgatcaagcaacagctgctcttaacgaagcgaaacaagctgctattgaagctcttaaacaagctgcggcagaaacacttgctaagattacaactgatgctaaattgactgaagctcaaaaagctgaacaatcagaaaatgtatcattagcgcttaagacggctattgcgactgttcgttcagcacaatctattgcgtctgtgaaagaagcaaaagataaaggtattactgctatccgtgcagcctatgtgcctaataaggcagtcgcaaaatcatcgtcagcgaaccatcttccaaaatcaggtgatgcaaactcaattgttcttgttggcttaggagttatgtctcttcttttaggtatggtgctttatagcaagaaaaaagaaagtaaagactaa

SEQ ID NO: 932 - protein, 2045 aa, Streptococcus pyogenes
MRKVKKVFVSSCMLLTVGLGVAVPTGFSQSNGVMVVKAAEVPATDLSRQASDSERVDESSLLQKENLSVDSFKLENLNGWEAENDTAGNLGKFKDPDSSGYQNILTSSGKNISVAVAPKGSGKMNIKVTKRSNFQGGYYVGGLRTQTPVLKLNDVYRYSFTTKKLSGNSSEFKTRVKPVESNNKLGKELVIRVDNKNVSTKHDWLPDISDGTHTVDFTGLDKKLSVAFRFSPRQTSNVVYEFSNINIKNISPASVPAIPSKVLEGTSVLSGTAISSGDTLEKRKSFDGDILRVYKDSKIIARTVIKGNKWDVKLSKPLIAGEKLDFEILHPRSQNVSKKISKQVEAKPFDPASYKEKVIAKLKPVYEATSEKITNDAWLDENAKDLQKQKLEEQYISGKVAISEAGTKQEAIDAAYNKYSSQTDPDSLPSQYKQGNKENEQEKGRQDLIQTRDLTLKAIQEDKWLTEQEKTIQKEEALKAFETGIESVNQTVSLEQLKQRLIVYKASEKDSEKKEYPESIPNQHIPGKEKEVKAAKQEELKKLHDTTLEKINQDKWLTPDQQAEQLKQAEVTFKKGQEAIKSAQTLTQLETDLADYVSENEGKGNSIPDKYKSGNKDDLVNKAEVKLKEAHEATKQAIEKDPWLSPEQKKAQKEKAKARLDEGLKALKAADSLEILKVTEEAFVDKEKNPDSIPNQHKAGTADQARKQALDSLDKEVQKELESIDNDNTLTTDEKAAAKKKVNDAYDVAKQTAMEANSYEDLTTIKDEFLSNLPHKQGTPLKDQQSDAIAELEKKQQEIEKAIEGDKTLPRDEKEKQIADSKERLKSDTQKVKDAKNADAIKKAFEEGKVNIPQAHIPGDLNKDKEKLLAELKQKADDTEKAIDVDKTLTEDEKKEQKVKTKAELEKAKTDVKNTQTREELDKKVPELKKAIEDTHVKGNLEGVKNKAIEDLKKAHTETVAKINGDDTLDKATKEAQVKEADKALAAGKDAITKADDADKVSTAVTEHTPKIKAAHKTGDLKKAQVDANTALDKAAEKERGEINKDATLTTEDKAKQLKEVETALTKAKDNVKAAKTADAINDARDKGVATIDAVHKAGQDLGARKSGQVAKLEEAAKATKDKISADPTLTSKEKEEQSKAVDAELKKAIEAVNAADTADKVDDALGEGVTDIKNQHKSGDSIDARREAHGKELDRVAQETKGAIEKDPTLTTEEKAKQVKDVDAAKERGMAKLNEAKDADALDKAYGEGVTDIKNQHKSGDPVDARRGLHNKSIDEVAQATKDAITADTTLTEAEKETQRGNVDKEATKAKEELAKAKDADALDKAYGDGVTSIKNQHKSGKGLDVRKDEHKKALEAVAKRVTAEIEADPTLTPEVREQQKAEVQKELELATDKIAEAKDADEADKAYGDGVTAIENAHVIGKGIEARKDLAKKDLAEAAAKTKALIIEDKTLTDDQRKEQLLGVDTEYAKGIENIDAAKDAAGVDKAYSDGVRDILAQYKEGQNLNDRRNAAKEFLLKEADKVTKLINDDPTLTHDQKVDQINKVEQAKLDAIKSVDDAQTADAINDALGKGIENINNQYQHGDGVDVRKATAKGDLEKEAAKVKALIAKDPTLTQADKDKQTAAVDAAKNTAIAAVDKATTTEGINQELGKGITAINKAYRPGEGVKARKEAAKADLEKEAAKVKALITNDPTLTKADKAKQTEAVAKALKAAIAAVDKATTAEGINQELGKGITAINKAYRPGEGVKARKEAAKADLEREAAKVREAIANDPTLTKADKAKQTEAVAKALKAAIAAVDKATTAEGINQELGKGITAINKAYRPGEGVEAHKEAAKANLEKVAKETKALISGDRYLSETEKAVQKQAVEQALAKALGQVEAAKTVEAVKLAENLGTVAIRSAYVAGLAKDTDQATAALNEAKQAAIEALKQAAAETLAKITTDAKLTEAQKAEQSENVSLALKTAIATVRSAQSIASVKEAKDKGITAIRAAYVPNKAVAKSSSANHLPKSGDANSIVLVGLGVMSLLLGMVLYSKKKESKD

SEQ ID NO: 933 - DNA, 2406 bp, Streptococcus pyogenes
atgttagtatcttataaatggttaaaagaattagtagatatcgatgtgacaccagcagcacttgctgagaaaatgtcgacaacgggtatcgaggtagaaggaattgaagtccctgcagatggtttatcaaaactggttgtggggcatgtgctttcttgtgaagatgtgccagagacacatttgcatttgtgtcaggtagatacaggtgatgaaacgccacgtcaaattgtgtgtggcgcaccaaatgtgaaagcagggattaaggttatcgtggctgtgccaggtgctcgtattgcggataactataaaatcaaaaaaggcaaaatccgcggcatggaatctcttggcatgatttgttccttgcaagaacttggtttgtcagatagtattattccaaaagaattttcagatggtattcaaatcttgccagaggaggctgtgccaggtgatgctatttttaaatacctggacttggacgatcatatcattgaattgtccattacacctaaccgtgctgatgcgctttctatgcgaggtgtggcacatgaagtcgcagctatttatggcaagtcagtatcattcccccaaaaaaatctacaagaatctgataaggcaacttcagaagccattgaagtggccattgcctctgataacgttctaacttacgctagccgtgtcgttgaaaatgtcaaagttaagccaagtccacaatggttgcaaaaccttttaatgaatgctggtattcgtcctattaataatgtggttgatgtgaccaactatgtgctcttgtattttggtcaacctatgcatgcttttgattatgataaatttgaagaccataagattgtggcgcgtgcggctcgtcaaggagaaagtttggtcacacttgatggtgaaaaacgggatttgaccactgaggatcttgttattaccgtggctgacaaaccagttgctttagcaggtgttatgggtggtcaagccactgaaattgatgccaactctcagacggttgttcttgaagctgctgtttttgatggcaaatcgattcgtaaaaccagtggtcgtttaaaccttcgttcggaatcctcttcacgttttgaaaaaggggttaactatgcaactgttttagaagcacttgactttgcagcggctatgttacaagaattagcagaaggtcaagtcttatcaggccatgttcaagctggacaattgccaacagaacctgttgaagtctcaactagccttgactatgtgaatgttcgtttaggaacagaattaacttttgctgatattcaaaggatttttgaccaacttggatttggtctaacaggagatgaaacaagcttcacggtagctgttcctcggcgtcgttgggatgttagcatcccagctgacttggtggaagaaattgcgcgtatctatggttatgataagttgccaacaaccttaccagaggcagggggaacggctgcagaattaacgccaacacaggctcttcgtcgtaaagtccgtggcttagcggaaggattgggcttgactgaaatcatttcgtatgctttgacaacaccagagaaagctgttgagtttgcagtggcaccaagtcacctgacagaactcatgtggccgatgtctgtggagcgttcagcactacgtcaaaatatggtttcagggatgttagatacggttgcctataatgtggctcgtaaacaaagtaacttggctctttatgaaattggaaaaatctttgaacaagaagctaatccaaaagaagaccttcctaatgaagtgaaccattttgcttttgctatttgtggcttagtggcacaaaaagatttccaaacccaagctcaggcagtggatttttaccatgctaaaggtaacttggatactttatttgcaaaccttaacctcaaggttcaatatgtgccaaccaaagacctagcaaacatgcacccaggacggacagcgcttatcctattagatgagcaagtgattggatttgttggtcaagttcatccaggaacagcaaaggcttatagtattccagaaacctatgtggcagaattggatatggctgctttagaagcagcgttgccaagtgatcaaacttttgcggaaatcacaaaattccctgctatgacacgtgatgttgccttgttacttgaccgtgaggtgagtcatcaggccattgtaacagctattgaatcagcaggtgtaaaacgcttgactagcattaaactctttgacgtctatgaaggagcaaccattcaggctggcaaaaaatcaatggcttatagccttactttccaaaatccaaatgacaatttaacggatgaagaagttgccaaatacatggagaaaatcaccaaagcattgacagaacaagtcggtgctgaagtacgctaa

SEQ ID NO: 934 - protein, 801 aa, Streptococcus pyogenes
MLVSYKWLKELVDIDVTPAALAEKMSTTGIEVEGIEVPADGLSKLVVGHVLSCEDVPETHLHLCQVDTGDETPRQIVCGAPNVKAGIKVIVAVPGARIADNYKIKKGKIRGMESLGMICSLQELGLSDSIIPKEFSDGIQILPEEAVPGDAIFKYLDLDDHIIELSITPNRADALSMRGVAHEVAAIYGKSVSFPQKNLQESDKATSEAIEVAIASDNVLTYASRVVENVKVKPSPQWLQNLLMNAGIRPINNVVDVTNYVLLYFGQPMHAFDYDKFEDHKIVARAARQGESLVTLDGEKRDLTTEDLVITVADKPVALAGVMGGQATEIDANSQTVVLEAAVFDGKSIRKTSGRLNLRSESSSRFEKGVNYATVLEALDFAAAMLQELAEGQVLSGHVQAGQLPTEPVEVSTSLDYVNVRLGTELTFADIQRIFDQLGFGLTGDETSFTVAVPRRRWDVSIPADLVEEIARIYGYDKLPTTLPEAGGTAAELTPTQALRRKVRGLAEGLGLTEIISYALTTPEKAVEFAVAPSHLTELMWPMSVERSALRQNMVSGMLDTVAYNVARKQSNLALYEIGKIFEQEANPKEDLPNEVNHFAFAICGLVAQKDFQTQAQAVDFYHAKGNLDTLFANLNLKVQYVPTKDLANMHPGRTALILLDEQVIGFVGQVHPGTAKAYSIPETYVAELDMAALEAALPSDQTFAEITKFPAMTRDVALLLDREVSHQAIVTAIESAGVKRLTSIKLFDVYEGATIQAGKKSMAYSLTFQNPNDNLTDEEVAKYMEKITKALTEQVGAEVR

SEQ ID NO: 935 - DNA, 669 bp, Streptococcus pyogenes
atgtcggttttaacatttaaacaagtgaccaaaacatttcaagatggtcatcacgaaatcaacgcattaaaggcaactgacttttccattgaagctggagaatttgtggctattattggaccatcaggttctggaaaatcaacctttttgaccattgctggtggcttacagaccccaagttctggtcagctaatcattgatggcactgattatacgcatttatcagaaaaagagcgctcacgcttgcgcttcaaatccgttggttttatcttacaagcttccaatctgatacctttttcaacggtccagcagcagttggaattggtcgatcatttgacaggaagcaaagaaaaagccaaagccaatcagttatttgacgatttaggcattacagggctaaaacatcagttacctcaagaattatccggcggagaaaggcaaagagcggctattgcccgtgctctttaccatgatccagcactgatattggcagacgaacctactgcaagtttggatactgaaaaagcctatgaagtggtcaaactgttggctaaggaaagtaaagaaaaaaacaaggccattattatggtcactcatgatgatcggatgctaaaatattgtgacaaagtctatcggatgcaagatggagagttatgtcaagagagatag

SEQ ID NO: 936 - protein, 222 aa, Streptococcus pyogenes
MSVLTFKQVTKTFQDGHHEINALKATDFSIEAGEFVAIIGPSGSGKSTFLTIAGGLQTPSSGQLIIDGTDYTHLSEKERSRLRFKSVGFILQASNLIPFSTVQQQLELVDHLTGSKEKAKANQLFDDLGITGLKHQLPQELSGGERQRAAIARALYHDPALILADEPTASLDTEKAYEVVKLLAKESKEKNKAIIMVTHDDRMLKYCDKVYRMQDGELCQER

SEQ ID NO: 937 - DNA, 855 bp, Streptococcus pyogenes
atgattttaattacaggaagcaatggtcaattagggacagaacttcgatacttattagatgaacgaggtgttgattatgtagccgttgatgtcgcagaaatggacatcacaaatgaagacaaagtcgaagctgtttttgcgcaggtcaagccaacattggtctatcattgtgctgcttatacggcagttgatgcagcagaagacgaaggaaaagccttgaatgaggctattaatgtaacaggctcagaaaatattgccaaggcttgtggaaaatatggggctacccttgtttacatttcaacagactacgtatttgatggcaataaaccagtcggtcaagaatgggtagaaacagatcatccagaccctaagacagaatatggccgtacaaaacgtttaggagaactagctgttgaacgatacgcagagcatttttatattatccgtactgcttgggtatttggaaattatggtaaaaactttgtctttaccatggagcagttagcagaaaatcactcccgtttgactgttgtcaatgaccaacacggtcggccaacgtggacaaggaccttggcagaattcatgtgttatttgacagagaatcaaaaagcctttggttactatcacttgtcaaatgatgctaaggaagacaccacttggtatgattttgccaaagaaatcttaaaagacaaggctgttgaagtggtgccagttgattcatcagctttcccagcaaaagccaaacgtcctttaaattcaaccatgaatcttgataaggcaaaagcaacagggtttgttattccaacatggcaagaagccttgaaggcattttaccaacaaggactgaaaaagtaa

SEQ ID NO: 938 - protein, 284 aa, Streptococcus pyogenes
MILITGSNGQLGTELRYLLDERGVDYVAVDVAEMDITNEDKVEAVFAQVKPTLVYHCAAYTAVDAAEDEGKALNEAINVTGSENIAKACGKYGATLVYISTDYVFDGNKPVGQEWVETDHPDPKTEYGRTKRLGELAVERYAEHFYIIRTAWVFGNYGKNFVFTMEQLAENHSRLTVVNDQHGRPTWTRTLAEFMCYLTENQKAFGYYHLSNDAKEDTTWYDFAKEILKDKAVEVVPVDSSAFPAKAKRPLNSTMNLDKAKATGFVIPTWQEALKAFYQQGLKK

SEQ ID NO: 939 - DNA, 762 bp, Streptococcus pyogenes
atggtaaaaacggattttaaattacgctatcaagggagcgcaattggctatctatggtctatcttaaaaccgcttatgatgtttacgattatgtacttggtatttattcgttttcttcgcctgggtggaaatgtacctcattttccagtagcgcttttattggcaaatgtcatctggtcttttttttcagaagcaactagcatgggaatggtatctattgtatctcggggagacttgttgcgaaaattgaacttttctaagcacatcattgttttttcggcagtgttaggagctttaattaattttcttattaatttggttgttgttttaatttttgcgttgataaatggtgtgactatatcagggtatgcttatctctctctttttctttttatagaattagttgttttagtgcttggaattgcattgttattgtcgaatgtctttgtttattatcgtgacttagctcaagtctgggaagtactattacaagcaggtatgtatgccactccaatcatttatccgatcacttttgttttagatagccaccctttggcggcaaagttgttgatgctaaatccagtagcacaaatgattcaagattttcgttatttattgattgacagggccaacgtaacgatttggcagatgtcaaccaattggttttacattgttattccatatttagtaccatttgttatattatttattggcatctttgtctttaagaaaaatgccgatagatttgcggagattatttaa

SEQ ID NO: 940 - protein, 253 aa, Streptococcus pyogenes
MVKTDFKLRYQGSAIGYLWSILKPLMMFTIMYLVFIRFLRLGGNVPHFPVALLLANVIWSFFSEATSMGMVSIVSRGDLLRKLNFSKHIIVFSAVLGALINFLINLVVVLIFALINGVTISGYAYLSLFLFIELVVLVLGIALLLSNVFVYYRDLAQVWEVLLQAGMYATPIIYPITFVLDSHPLAAKLLMLNPVAQMIQDFRYLLIDRANVTIWQMSTNWFYIVIPYLVPFVILFIGIFVFKKNADRFAEII

SEQ ID NO: 941 - DNA, 342 bp, Streptococcus pyogenes
atgacggtaacagccagtttatttataagttttattgtattaacctttgttttctttttgattaacttaatcaaaaaagataaactagcgattaagtactctttattgtggtttattttagctttattaattttactatttacgtggttacctaacatattaaataaaatgtctcacttcctgggtattcattcaccaaccaatatgttattctttttaggtttttgtttgagtttagctattattttttcactgactaataatatttcacttcaaaatgataaagtaaaacgtctgacccaagaagtggcccttatgaaaaaagagaaaaccaatgattaa

SEQ ID NO: 942 - protein, 113 aa, Streptococcus pyogenes
MTVTASLFISFIVLTFVFFLINLIKKDKLAIKYSLLWFILALLILLFTWLPNILNKMSHFLGIHSPTNMLFFLGFCLSLAIIFSLTNNISLQNDKVKRLTQEVALMKKEKTND

SEQ ID NO: 943 - DNA, 1224 bp, Streptococcus pyogenes
atgaagtacgataacttgttagatcgatttataaaatatgtcaaagtgaatacaagaagcgttccagacagtgagactactcctagtacggagagtcaagaagcatttgccttaacgattttaaagcctgaaatggaggcaattggtttgcaagatgttcattataatccagttaatggctatcttattggaactctgcctgccaataatccaaccttgacgcgtaaaattggttttatagcccatatggatacggctgatttcaatgctgaaaatgttaatccgcagattattgacaattatcaaggaggggacattacacttggcagttctaattataagttggatccaaaagcatttccaaatcttaataattatatcggtcaaacattgattaccactgatgggactacacttttaggggcagatgataaatctggtattgctgaaatcatgacagcaatagaattcttgacatcacaaccacaaatagagcactgtgacattaaagtggcttttggccctgatgaagagattggggtcggagctgataagtttgaggtggctgattttgaggtggattttgcttatactatggatggcggtcctttaggcgaattgcaatatgaaactttcagcgctgcagctctagaagtgacttttttaggcagaaatgttcatcctggtacggctaaggatcaaatgattaatgcccttgagttagcaatagattttcatgagaagctacctgctaaagatcggcctgaatacacagatggttatcaaggtttctatcacttaacgggactaactggaacagttgaagaggcacgcgcatcttacattattcgtgattttgaagaagcatcatttgaagctagaaaagtgaaagttgaaaatatagctcaatcgatgaatgctcagctaggaacaaaacgtgtcttggtagagcttaatgaccaatactacaatatgaaaaaagttatcgaaaaagatatgaccgctattgagttagctaaagaagtaatggaagagcttgctatcaagcctgtaatcgaacccatacgtggaggaacagatggctctaaaatttcatttatgggtattcccactcctaatatttttgcagggggtgagaatatgcacgggcgttttgagtttgttagcttacaaacgatggagagagctgtcgatgtcattattggacttgtttgcaaagcctaa

SEQ ID NO: 944 - protein, 407 aa, Streptococcus pyogenes
MKYDNLLDRFIKYVKVNTRSVPDSETTPSTESQEAFALTILKPEMEAIGLQDVHYNPVNGYLIGTLPANNPTLTRKIGFIAHMDTADFNAENVNPQIIDNYQGGDITLGSSNYKLDPKAFPNLNNYIGQTLITTDGTTLLGADDKSGIAEIMTAIEFLTSQPQIEHCDIKVAFGPDEEIGVGADKFEVADFEVDFAYTMDGGPLGELQYETFSAAALEVTFLGRNVHPGTAKDQMINALELAIDFHEKLPAKDRPEYTDGYQGFYHLTGLTGTVEEARASYIIRDFEEASFEARKVKVENIAQSMNAQLGTKRVLVELNDQYYNMKKVIEKDMTAIELAKEVMEELAIKPVIEPIRGGTDGSKISFMGIPTPNIFAGGENMHGRFEFVSLQTMERAVDVIIGLVCKA

SEQ ID NO: 945 - DNA, 2211 bp, Streptococcus pyogenes
atgacatctttaggaaaaaacgataaggaagttgctactgtgaagaaatttaaaacacttatcacaggttttatcaacacaagattgggttttataattactctactcttttgttactggataaagaccctgtgggcatatcatacagacttttcactagatttgggaaatatataccaagtctttctaactattatcaatccaatcccactagcttttttacttttgggggttgctctttacgttaagaatacccgagccttttatatctgttcttgggtggtttatattatccttaacattctcttgatatcaaattctatatattaccgagaattttcagactttattacagtgagtgccatgctagctagtagtaaagtctccgctggattaggggactctgctttaaaccttttacgcatctgggatattatctatattcttgattttattattctaattagtttatctatcgctaaaaaaatcaaaaatgatcaacgtccttttaacaagcgcgcagcatttgccatcaccgctttatctagtctattgctttctattaatctttttttagcagaaattgatcgtccggaactattaacacgtggcttttcaaatacttatattgtgagagctttaggactaccagcgtttaccctctatagcggcaatcaaacctatcaagctcaaaaagaacgaaatggagctactgcagaagaattaattgatgttaaaacttatgtcaaaggacattatgcagcacctgatcctcagtattttggaattggaaaaggcaaaaatattattgttcttcatttagaaagctttcaacaattcttaatagattataaactaaaagaaggagataaagaatatgaggtaacgccttttatcaactcactttatcactcaaatgctaccttagcattccctaacttttttcatcaggttaaagcaggtaaaacttctgatgctgaaaccatgatggagaattccttatttggtttaaatagtggttcttttatggtgaactacggtggtgaaaatacacaatttgctactccaagtattttagcccaaaaaggtggctataccagcgctgtctttcatggtaacgttggaactttctggaatcgcaataatgcttataaacaatggggctataattatttttttgattctagctacttctctaaacaaaatagtaagaactcttttcaatatgggttaaatgataagtacatgtttaaggattccataaaatatcttgaacagatgcaacaacctttttataccaagtttatcactgtgagtaatcactatccttatactagtctaaaaggcgaaagtagtgaagaaggttttcctttagccaaaacagacgatgaaacgatcaatggttactttgctactgccaattatttagacgctgcccttaaatctttttttgattacttgaaagccactggtttgtacgacaattctatttttgttttatatggtgatcattatggtatttcaaattctcgtaattctagtcttgctccacttcttggtaaagattctgaaacttggtctgaatatgataatgctatgctacaacgagtcccgtatatgatccatattccaggttatacgaatggtagtatcaaagaaacctttggcggtgaaatcgatgctcttcctactttactccacatacttggtattgacactagtcagtttgttcaattaggacaagatttattatcacctcaaaatagccagattgtggcacaacgaacatctgggacttatatgactcctgaatacactaactatagtggacgtctgtacaacacgcaaacaggtttagaaatcactaatcccgatgaaatgactatagccaaaactaaggaaattcgctctgctgttgctcaacaactagcagctagcgacgctattcaaacgggtgatctcctgcgctttgatactcaaaatggtctaaaagctattgatcctaaccagtttatctacactaagcagttaaaacaactgaaagatatttcagcaaaactcggatcagagtcaacaagtttatacagtaaaaatggtcataaatcaactcagaaactttttaaagcaccatcttacttagaactaaatcccgtagaagctgacgcggcaacttctgaactaaaagaggataaccccaaaaataaagaataa

SEQ ID NO: 946 - protein, 736 aa, Streptococcus pyogenes
MTSLGKNDKEVATVKKFKTLITGFINTRLGFIITLLFCYWIKTLWAYHTDFSLDLGNIYQVFLTIINPIPLAFLLLGVALYVKNTRAFYICSWVVYIILNILLISNSIYYREFSDFITVSAMLASSKVSAGLGDSALNLLRIWDIIYILDFIILISLSIAKKIKNDQRPFNKRAAFAITALSSLLLSINLFLAEIDRPELLTRGFSNTYIVRALGLPAFTLYSGNQTYQAQKERNGATAEELIDVKTYVKGHYAAPDPQYFGIGKGKNIIVLHLESFQQFLIDYKLKEGDKEYEVTPFINSLYHSNATLAFPNFFHQVKAGKTSDAETMMENSLFGLNSGSFMVNYGGENTQFATPSILAQKGGYTSAVFHGNVGTFWNRNNAYKQWGYNYFFDSSYFSKQNSKNSFQYGLNDKYMFKDSIKYLEQMQQPFYTKFITVSNHYPYTSLKGESSEEGFPLAKTDDETINGYFATANYLDAALKSFFDYLKATGLYDNSIFVLYGDHYGISNSRNSSLAPLLGKDSETWSEYDNAMLQRVPYMIHIPGYTNGSIKETFGGEIDALPTLLHILGIDTSQFVQLGQDLLSPQNSQIVAQRTSGTYMTPEYTNYSGRLYNTQTGLEITNPDEMTIAKTKEIRSAVAQQLAASDAIQTGDLLRFDTQNGLKAIDPNQFIYTKQLKQLKDISAKLGSESTSLYSKNGHKSTQKLFKAPSYLELNPVEADAATSELKEDNPKNKE

SEQ ID NO: 947 - DNA, 1353 bp, Streptococcus pyogenes
atggttattccttatgattatattgttattggtggagggagtgcaggtattgcttctgcgaacagggcagccatgcatggggccaaagtattgttagctgaaggtaaagagattgggggaacctgtgttaacctaggctgcgttcctaaaaaagtcatgtggtatggcgctcaagtagcagatattttagggacttacgctaaggattatggatttgactttaaagagaaagcatttgattttaaacaattgaaagcaaatcgtcaagcttatattgatcggattcatgcttcttatgagcgaggctttgagcagaatggtgttgaccgtatttatgattatgctgttttcaaagatgctcatacggtagaaattgcagggcagctttataccgcaccgcatattttgattgctacaggaggacatcctgtttttccagatattgagggggcacaatacggtatcagctcggacggcttttttgccttagatgaggtaccaaaacgtacggctgtggttggggcaggctatattgctgtggaacttgctggtgttttgcatgctttgggatcgaagacggatttgtttatccgtcacgatcgacctttaagaagttttgacaaaaccattgttgatgtcttagttgatgaaatggcagttaatgggccgcgtttacacactcatgcagaagtggcaaaggttgtcaaaaatactgatgagtccttgaccctttacctcaaagatggccaagaagttgaggttgaccagctcatttgggctatcggtcgcaagcctaatctagaaggttttagtcttgacaaaactggagtgacgttaaatgataaaggttatattgagacagatgcctatgaaaacacgtctgtcaaaggtatttatgccgtgggagatgttaatgggaaactggctttaactccagttgctgtggcagctggacgtcgcctatcagagcgtcttttcaatggcaaaacagacgagaaattggactaccaaaacgttgctactgtgatttttagtcaccctgttattggctctgttggcttgtcagaagaagcagcagtcaaacagtatgggcaagaagcagttaaaacatatcaatcacgttttacgtctatgtttactgctatcactaaccatcgccaaccttgtctgatgaagttggtaacagtcggagataccgaaaaaatagttggtcttcacggaatcggatacggggttgacgaaatgattcagggctttgcagtagccatcaaaatgggagcaaccaaggcggattttgataacaccgttgctattcacccaactggctcagaagaatttgtcaccatgcgctaa

SEQ ID NO: 948 - protein, 450 aa, Streptococcus pyogenes
MVIPYDYIVIGGGSAGIASANRAAMHGAKVLLAEGKEIGGTCVNLGCVPKKVMWYGAQVADILGTYAKDYGFDFKEKAFDFKQLKANRQAYIDRIHASYERGFEQNGVDRIYDYAVFKDAHTVEIAGQLYTAPHILIATGGHPVFPDIEGAQYGISSDGFFALDEVPKRTAVVGAGYIAVELAGVLHALGSKTDLFIRHDRPLRSFDKTIVDVLVDEMAVNGPRLHTHAEVAKVVKNTDESLTLYLKDGQEVEVDQLIWAIGRKPNLEGFSLDKTGVTLNDKGYIETDAYENTSVKGIYAVGDVNGKLALTPVAVAAGRRLSERLFNGKTDEKLDYQNVATVIFSHPVIGSVGLSEEAAVKQYGQEAVKTYQSRFTSMFTAITNHRQPCLMKLVTVGDTEKIVGLHGIGYGVDEMIQGFAVAIKMGATKADFDNTVAIHPTGSEEFVTMR

SEQ ID NO: 949 - DNA, 1269 bp, Streptococcus pyogenes
atgactacctatgatagcatttcctggattcatacctttaaggctaatggtcgcaagaccgatttggccagaatggcttggttacttgaggcactaggccggccacaagacaaattccctgctattcacgttgttggaactaacggcaagggctctgtgacagcctacttacagcatatcctgtcaacttctggttatcaggtcggaacctttacatctccttttattatctcttttcacgatcggatttgccttaatggccagcccatttcagacctagaattggcgcaatgtgtgagcgtgattagacccattctcactaaaatgtctcttgaaacaaattgggatagacctaccgagtttgagttagtgacgctcataatgttttgctactttgccaatcttaaacctgttgatattgccattattgaggcagggattggtgggaaaaccgacgcaaccaatgtttttcatgctctggccgtcgtatgcccttctattagttttgatcaccaagaacgtttaggttatagcctagcagaaattgctcaccaaaaagcagaagttatcaaagctaaagaacccgttattatcggtcaacttgagcaggaggctagtcaagtctttcaacaagttacccaaaaagccggttcacgcttatatcaattaggaaaagattttttgctcaatccttcagaaaagacgttttcctttcaacacgataacttgaatttaaccaaactccgtctcaaactattaggtcaacatcaaaaagcgaatgcctgtttagccattatgacagctcaattacttagaaaatcctttcctaaaatatctccaaaaacgattcaaaaaggaattgaggcaacaacttggcctggccggtccgaatttattcaacctaatcttctattagacggcgctcacaatccagattccattgctaaattaaagtctctactgcaagaagaatttcccaaacgtcctattcatattctctttgcaggtctcaaacgtaagcctttagccgacttgctggctcaactagatacttttgaagtatctgtcacgacttttgatttccctgaagcaaatcttttagaggattatcctgataaatacccacaggtaaaagattacagagactggttacaaggttccgtaacatctgatgaactctttgttgttacagggtcactttattttatctccgaggtaaggcaatattgtctgagcaacgcaaatatctttaaaaacatattcccctaa

SEQ ID NO: 950 - protein, 422 aa, Streptococcus pyogenes
MTTYDSISWIHTFKANGRKTDLARMAWLLEALGRPQDKFPAIHVVGTNGKGSVTAYLQHILSTSGYQVGTFTSPFIISFHDRICLNGQPISDLELAQCVSVIRPILTKMSLETNWDRPTEFELVTLIMFCYFANLKPVDIAIIEAGIGGKTDATNVFHALAVVCPSISFDHQERLGYSLAEIAHQKAEVIKAKEPVIIGQLEQEASQVFQQVTQKAGSRLYQLGKDFLLNPSEKTFSFQHDNLNLTKLRLKLLGQHQKANACLAIMTAQLLRKSFPKISPKTIQKGIEATTWPGRSEFIQPNLLLDGAHNPDSIAKLKSLLQEEFPKRPIHILFAGLKRKPLADLLAQLDTFEVSVTTFDFPEANLLEDYPDKYPQVKDYRDWLQGSVTSDELFVVTGSLYFISEVRQYCLSNANIFKNIFP

SEQ ID NO: 951 - DNA, 936 bp, Streptococcus pyogenes
atgtcagttgtaaataatcgcgttgcacttaccaatttagtttcaatggaagcattaaccaccgaagaagttttaggtcttatcaaccgtggttcagaatataaggctggtaaagttgttatttcggatcatcaaaaggatcttgttgccaatttattctttgaaaactccacccgaacccataagtcttttgaagtggctgagaagaaactcggcttgacagttcttgatttcaatgctgatgcaagtgcggttaacaagggagaaagtttgtatgatactgtgttaaccatgagtgcacttggaacagacatctgtgtgattcgtcacccagaagatgattattacaaggaattagtagaaagtccaactattacagcttccattgtcaatggaggagatggttctggacaacacccgagtcaatgtttacttgacttattaaccatctatgaagaatttggacgctttgaaggcttaaagattgcgatcgctggtgacttaactcactctagggtggcaaagtccaacatgcaaatcctcaaaagattaggagcagagctttatttctatggacctgaagaatggtattcagaagcctttaatgcttacggcacttatattgctattgaccagattattaaggaattggatgttcttatgttgctgcgtgtacagcacgaacgtcatgacggccatcagagtttttcaaaagaaggttaccatcaagcgtttggattgacacaggaacgttaccaacaattaaaagattctgctattattatgcatccagctccagttaatcgggatgtggaaattgcagatagtttggtggaagctcctaaagcgagaattgtatctcagatggctaatggtgtctttgttcgcatggctattattgaagccattttgaatggtagaaataaaaactcatga

SEQ ID NO: 952 - protein, 311 aa, Streptococcus pyogenes
MSVVNNRVALTNLVSMEALTTEEVLGLINRGSEYKAGKVVISDHQKDLVANLFFENSTRTHKSFEVAEKKLGLTVLDFNADASAVNKGESLYDTVLTMSALGTDICVIRHPEDDYYKELVESPTITASIVNGGDGSGQHPSQCLLDLLTIYEEFGRFEGLKIAIAGDLTHSRVAKSNMQILKRLGAELYFYGPEEWYSEAFNAYGTYIAIDQIIKELDVLMLLRVQHERHDGHQSFSKEGYHQAFGLTQERYQQLKDSAIIMHPAPVNRDVEIADSLVEAPKARIVSQMANGVFVRMAIIEAILNGRNKNS

SEQ ID NO: 953 - DNA, 3177 bp, Streptococcus pyogenes
atgccaaaacgaaaagatattcaaaaaatcatggttatcgggtctggcccgattattattggacaagctgctgaatttgattatgcagggactcaggcctgtttggctctaaaagaagaaggctacaaagtcatacttgttaattcaaatcctgcaacgattatgacagataaagaaatcgctgataaggtatatattgagcctttgactcttgaatttgttaatcgtatcattcgaaaagaaaggccagatgccatactgccaaccttaggtggccaaacgggcctcaatatggcaatggcgttatctaaagctggtattcttgatgatttagagattgaattgttaggtactaagttatctgcgattgatcaggcagaagacagagaccttttcaaacaattaatgcaagaactagaccaacccattccagaatctacaattgttaaaacagttgatgaagctgttacatttgctagagatatcggttatccagtcattgtgcgcccagcttttactcttggtggaactggtggaggaatatgtagtagtgaagaagaactttgtgaaattactgaaaacggcctaaagttatcaccagtcacacagtgtttgattgaacgctcaattgctggcttcaaagaaattgaatacgaagtaatgcgagatagtgctgataacgcgctggttgtttgtaatatggaaaactttgatcccgtagggattcacacaggagattctattgtatttgcaccaacacagaccctttctgatattgaaaatcaaatgttacgtgatgctagtttaaaaataattcgagctctgaaaattgaaggtggctgtaacgtccagttagcactagatccttatagtttcaaatattatgttattgaagtaaatcctagagtgtctcgttcctctgcccttgcttcaaaagcaacaggttatcccattgccaaattggctgcaaagattgctgttggcctaacacttgatgaaatgattaaccctatcacaggcactacttacgctatgtttgaacctgcccttgattacgttgttgctaaaattccgcgttttccgtttgataaatttgaacatggtgaacgccaactgggaactcaaatgaaagcaacaggtgaagtcatggctattggccgtaatttggaagagtccttactaaaagcctgtcgttctttagaaattggtgtttgccataatgagatgacaagtttaagtaacattagtgatgaagagttagtgactaaagtgattaaagctcaagatgatcgacttttttacttgtcagaagcaatacgacgaggttatagtatcgaagaacttgagagcttgaccaagattgatttatttttcttggataaattacttcatattgttgaaatagagcaagaattacaaatgcatgttgaccatttggaaagcctcaaaaaagcaaagcgttatggattttcagatcaaaaaattgcagaaatttggcaaaaggatgaaagtgatatcagagcgatgagacattctcatagcctgtatcctgtctataaaatggtagatacttgtgcagctgaatttgatgctaaaaccccttatttttattcaacatatgagttggaaaatgaatctgttcagtcgaataaagaatcaattttagttttaggttcaggccctattcgtattggtcaaggggttgaatttgactacgcaacggttcattctgttaaagccatccaaaaagctggctatgaagccattatcatgaattcaaatccggagactgtatctacagatttttcggtatcagataaattatattttgaaccgttaacctttgaagacgtcatgaatgtgatagatttagagcagcctaagggagtaatagttcagtttggaggacaaactgctattaacttagcacaagcactttctgaggcgggtgttacaatattaggaacacaagtagaggatttggatagggctgaagacagagatttatttgaaaaggcgttgaaagagcttggaatcccacaaccacaaggtcaaacggcaactaatgaagaagaagctttagaggcagctaaaaaaattggttttccagtcttagttagaccttcttacgtacttggtggccgggctatggaaattgttgaaaacaaagaagatcttagagaatatataagaacagcggttaaagcaagtcctgaacatcctatcttagtggactcttatattttcggtaaggagtgtgaagtggatgccatttcagatggaaaatcagtcttaattcctggtattatggagcacatcgaaagagcaggtgttcattcaggagattcaatggcagtttatccgccacagcaattatctaagcaaattcaagaaacaatagctgagtatactaaacgtttagccattgggttaaattgtattggtatgatgaatgttcaatttgttattaaaaatgaacaagtttatgttattgaagtgaatccacgcgctagtcgtaccgtacctttcttatcaaaagtaacaggtattccgatggctcagattgctactaagttgattttaggtcaaacattaaaggatctaggatatgaagatggtctttatccccaaagtccactggtgcatatcaaagcgcctgtgttttcatttacaaagttggcacaggttgatagtcttttaggtcctgaaatgaaatcaactggagaagtaatgggttcggatactagtcttgaaaaagcactttataaagcgtttgaagccaataattctcatttatcagaatttggtcaaattgtctttactatagcagatgatagtaaggcagaagctctaagtctagcaagacgatttaaggcgattggctatcaaattatggctactcaaggtacagcagcttactttgctgagcaaggcttaagcgcgtgtttagttggaaaaattggtgatgctgccaatgacatcccgacactcgtgcgacatggtcacgttcaggcaattgttaatacagttggaattaaacgcacagctgataaagacggacagatgattagaagttcagctattgaacaaggagttcctttatttacagctttagataccgcaaaagctatgttaacggttttagaaagcagatgctttaacatcgaagcgatataa

SEQ ID NO: 954 - protein, 1058 aa, Streptococcus pyogenes
MPKRKDIQKIMVIGSGPIIIGQAAEFDYAGTQACLALKEEGYKVILVNSNPATIMTDKEIADKVYIEPLTLEFVNRIIRKERPDAILPTLGGQTGLNMAMALSKAGILDDLEIELLGTKLSAIDQAEDRDLFKQLMQELDQPIPESTIVKTVDEAVTFARDIGYPVIVRPAFTLGGTGGGICSSEEELCEITENGLKLSPVTQCLIERSIAGFKEIEYEVMRDSADNALVVCNMENFDPVGIHTGDSIVFAPTQTLSDIENQMLRDASLKIIRALKIEGGCNVQLALDPYSFKYYVIEVNPRVSRSSALASKATGYPIAKLAAKIAVGLTLDEMINPITGTTYAMFEPALDYVVAKIPRFPFDKFEHGERQLGTQMKATGEVMAIGRNLEESLLKACRSLEIGVCHNEMTSLSNISDEELVTKVIKAQDDRLFYLSEAIRRGYSIEELESLTKIDLFFLDKLLHIVEIEQELQMHVDHLESLKKAKRYGFSDQKIAEIWQKDESDIRAMRHSHSLYPVYKMVDTCAAEFDAKTPYFYSTYELENESVQSNKESILVLGSGPIRIGQGVEFDYATVHSVKAIQKAGYEAIIMNSNPETVSTDFSVSDKLYFEPLTFEDVMNVIDLEQPKGVIVQFGGQTAINLAQALSEAGVTILGTQVEDLDRAEDRDLFEKALKELGIPQPQGQTATNEEEALEAAKKIGFPVLVRPSYVLGGRAMEIVENKEDLREYIRTAVKASPEHPILVDSYIFGKECEVDAISDGKSVLIPGIMEHIERAGVHSGDSMAVYPPQQLSKQIQETIAEYTKRLAIGLNCIGMMNVQFVIKNEQVYVIEVNPRASRTVPFLSKVTGIPMAQIATKLILGQTLKDLGYEDGLYPQSPLVHIKAPVFSFTKLAQVDSLLGPEMKSTGEVMGSDTSLEKALYKAFEANNSHLSEFGQIVFTIADDSKAEALSLARRFKAIGYQIMATQGTAAYFAEQGLSACLVGKIGDAANDIPTLVRHGHVQAIVNTVGIKRTADKDGQMIRSSAIEQGVPLFTALDTAKAMLTVLESRCFNIEAI

SEQ ID NO: 955 - DNA, 687 bp, Streptococcus pyogenes
atgcaattatcaaatattgtgaagagctatcaaaatggggatcaagttcttaaagttttgaaaggtattaatttaacagtatatgagggtgaatttttagctattatgggtccgtctggttcgggaaaatcaacactaatgaatattattggtttattagatcgtccaacatccggagattacacattacataatactaaaatagaaatccttaatgatcgtgaattagcaaaagtacgaaatgatgaaatcggctttgtctttcaacaattctttctgttagctaaattaactgcattacaaaatgttgaattgcctcttatttatgctggtgtaaacgtctcaaaaagacgtgaacaggctaagcaatttcttgaaaaagtaggacttggacgacgtatcaaacatctaccgtcagaactgtcaggaggtcaaaagcaaagggtggctatcgcacgagctttagtaaatgacccatctattattttagcggatgaaccaacaggtgcactagatactaaaacaggtcagcaaattatggaactcttgacagagttaaacaaagaaggtaaaacaattattatggttactcatgaaccagaaattgctgattttgcaactcggaaaattattattcgtgatggtgatatcacaacggatactacagctagtgttgttattgactag

SEQ ID NO: 956 - protein, 228 aa, Streptococcus pyogenes
MQLSNIVKSYQNGDQVLKVLKGINLTVYEGEFLAIMGPSGSGKSTLMNIIGLLDRPTSGDYTLHNTKIEILNDRELAKVRNDEIGFVFQQFFLLAKLTALQNVELPLIYAGVNVSKRREQAKQFLEKVGLGRRIKHLPSELSGGQKQRVAIARALVNDPSIILADEPTGALDTKTGQQIMELLTELNKEGKTIIMVTHEPEIADFATRKIIIRDGDITTDTTASVVID

SEQ ID NO: 957 - DNA, 1734 bp, Streptococcus pyogenes
atgacatttttatctgatttgatatcattaatgacaaaaatcagattatcttgggtaataaaggcgggtatttttcaattattatttgtaacgattgctaatattgtcttatcagaatttttctattttatattagacgttactggtcaatatcatttagataaagacaatgttgtgacttttttaaaaaatcctatagcacttgctttattaggtgcctatttatttttattagctgcttttattcaccttgagttttttgctctatatcgaattattgcggatcaagaaattagtttctatctttttagaaaacagttttcttattacctaagggggctttggaaaacattttctggttaccaattattactttttttgctttatatcctattgactattccagtcttacatattggtttatcttctgtgattactcaaaagctttatcttccagaatttattgttggggaattatcaaagataactagcacaaagtacttgctttatggcagtcttattcttgtgttttaccttaacctaagattagtatattttttaccattgatagcaatcaaccatcgtacggttgctcaagcatggagagagagttggcaaaagactaaaaagaaacatgtattgttatggatgaaactttttgcaatcaatggtcttacgattgtagtcttatcgctagctatttccatgattcttatttttgttgatatgtttaatcctaaggggaataatattattgttcagctgggagctttgacctttacatgggaactcattttttttactactattttttttaaactctgttcagcaatgattttaaaagaggcaattgaaccacaaaagcaatatgatgagccaagaagaagtaataaggcatatgttgtaatctttatcgtggttacagtaggttttgcttatcaatctcttgaacgtttaactttttttgacacatctcactctaagacagttatcgcgcatagaggacttgtatcagcaggtgtagaaaattctctggaagcccttgaaggtgctaagaaagcaggaagtgattatgtagaactggatctaatcttgactaaggataatcactttgtggtgtctcatgataatcgattgaagcgtttagctggagtaaataagacgattcgcaacttaaccttaaaagaagttgaacatctaacgagtcatcaaggacatttttcagggcgttttgtttcttttgacactttttatcaaaaggctaagaagttgaatatgccattacttattgaactcaagccaattggtacagaacctggaaattatgtcgatttgtttttagaaacttatcatcgacttggtataagcaaagataataaagtcatgtctttagatttagaagtaatagaagctatcaagaaaaaaaatccatcaattacgactggttatatcataccaattcaatttggattttttggagatgaatttgttgatttctatgtcattgaagacttttcttatcggtcttatttgtcgtcccaagctttttggaataataaagaaatttacgtttggactattaatgatcccaagcgcatagagcattatctcctaaagcctattcagggaattattacagaccaaccagctttaactaatcaattgattaaagacttaaaacaagataattcttattttagtcgattagtcagaattattagtagtctttattaa

SEQ ID NO: 958 - protein, 577 aa, Streptococcus pyogenes
MTFLSDLISLMTKIRLSWVIKAGIFQLLFVTIANIVLSEFFYFILDVTGQYHLDKDNVVTFLKNPIALALLGAYLFLLAAFIHLEFFALYRIIADQEISFYLFRKQFSYYLRGLWKTFSGYQLLLFLLYILLTIPVLHIGLSSVITQKLYLPEFIVGELSKITSTKYLLYGSLILVFYLNLRLVYFLPLIAINHRTVAQAWRESWQKTKKKHVLLWMKLFAINGLTIVVLSLAISMILIFVDMFNPKGNNIIVQLGALTFTWELIFFTTIFFKLCSAMILKEAIEPQKQYDEPRRSNKAYVVIFIVVTVGFAYQSLERLTFFDTSHSKTVIAHRGLVSAGVENSLEALEGAKKAGSDYVELDLILTKDNHFVVSHDNRLKRLAGVNKTIRNLTLKEVEHLTSHQGHFSGRFVSFDTFYQKAKKLNMPLLIELKPIGTEPGNYVDLFLETYHRLGISKDNKVMSLDLEVIEAIKKKNPSITTGYIIPIQFGFFGDEFVDFYVIEDFSYRSYLSSQAFWNNKEIYVWTINDPKRIEHYLLKPIQGIITDQPALTNQLIKDLKQDNSYFSRLVRIISSLY

SEQ ID NO: 959 - DNA, 522 bp, Streptococcus pyogenes
atgacaaaagacagacaaatcaaaaaaacaaaaacagctatctatagtgcttttattgctttattacaaaaaaaagaatattcgaaaataactgttcgagatatgattacacttgctaatgtagggagatcaaccttttatgcacattatgaaagcaaagaaatgttactaaaagaactctgtgaagaactttttcatcatttgtttaggcaaaaaagaaatgtgacttttgaggactatttggtacatattttaaagcattttgaacaaaataaagacagcattgcgacgttgttactttctaatgatccctattttttattaagatttaaaaacgaactagaacatgatgtttaccctaacttgcgctgcaagtatatcgacaaaacgactattccagaagtattcctaaaacaatttgttctatctagttttatagaaaccttaaaatggtggctccatcaaaggcaaaggatgtctgcaaatgaactattaaagtattatttagagctcataaaataa

SEQ ID NO: 960 - protein, 173 aa, Streptococcus pyogenes
MTKDRQIKKTKTAIYSAFIALLQKKEYSKITVRDMITLANVGRSTFYAHYESKEMLLKELCEELFHHLFRQKRNVTFEDYLVHILKHFEQNKDSIATLLLSNDPYFLLRFKNELEHDVYPNLRCKYIDKTTIPEVFLKQFVLSSFIETLKWWLHQRQRMSANELLKYYLELIK

SEQ ID NO: 961 - DNA, 1194 bp, Streptococcus pyogenes
atgccttctgagtttcagaaggctttacccatattgactaaaataaaagaagctggttatgaagcctattttgtgggaggaagcgtcagagatgttttactcgagcgtcccattcatgatgtagatattgcaactagttcctatcctgaagagactaaagcgatttttaacagaactgtcgatgttggcattgaacatggtacagtgctcgtgcttgaaaatggcggtgagtatgaaattacaacctttaggacagaagatatctatgttgattatcgccgtcctagtcaggtttcttttgtgcgctctttagaggaagacttaaaacgaagagactttaccgtcaatgccttggccttggatgaaaatggtcaagttattgataaatttagaggactcattgatttaaagcaaaaacggttacgagcagtgggtaaagcagaggaacgttttgaagaagatgcactacgcattatgagaggctttcgatttgcggcgagtctggattttgacattgaagctataacttttgaagctatgaggagccattcacctctattggaaaagatttctgtggaacgttcttttactgaatttgataaattattgatggcaccgcactggcgaaaagggatttctgccatgattgcttgtcaggcttacgactatttaccaggcttgaagcagcaggaagcaggcttgaatcatctgatagtttctttgaaagataactttacctttagtgattatcaccaagcttgggcttatgtgatgattagtttagccattgaggatcctaaaagcttcctaaaagcatggaagacttcaaatgattttcagcgttatgtcacaaagttgattgctctttatagaattcgtcaggaaagatcttttgaaaaattggatatttaccagtacggcaagaaaatggcgagtctagtggaagacctccgaaaagctcaaagcttatccgttgacatggatcgtattaatactttagatcaggcactggttattcatgacaaacacgatatcgtccttaatggttctcacctgattaaggattttgggatgaaatcaggtcctcagctagggcttatgcttgagaaagttgaattagcgattgtagaggggcgcctagataatgatttcactacaattgaagcatttgttagagaggaattagcaacatga

SEQ ID NO: 962 - protein, 397 aa, Streptococcus pyogenes
MPSEFQKALPILTKIKEAGYEAYFVGGSVRDVLLERPIHDVDIATSSYPEETKAIFNRTVDVGIEHGTVLVLENGGEYEITTFRTEDIYVDYRRPSQVSFVRSLEEDLKRRDFTVNALALDENGQVIDKFRGLIDLKQKRLRAVGKAEERFEEDALRIMRGFRFAASLDFDIEAITFEAMRSHSPLLEKISVERSFTEFDKLLMAPHWRKGISAMIACQAYDYLPGLKQQEAGLNHLIVSLKDNFTFSDYHQAWAYVMISLAIEDPKSFLKAWKTSNDFQRYVTKLIALYRIRQERSFEKLDIYQYGKKMASLVEDLRKAQSLSVDMDRINTLDQALVIHDKHDIVLNGSHLIKDFGMKSGPQLGLMLEKVELAIVEGRLDNDFTTIEAFVREELAT

SEQ ID NO: 963 - DNA, 1008 bp, Streptococcus pyogenes
atgtctaattattgtgtgcaaacaggtgggaaactatacctcacaggcgaatatgctatcttaacaccaggacaaaaagccttaattcactttattccattgatgatgacagcagaaattagcccagcagcccatattcaattagcttcagatatgttttcccataaagcgggcatgacacccgatgcctcttatgcactgattcaagcaacggttaaaacctttgctgattatctaggacagtcaattgaccaactggagccattttccctaattataacgggaaaaatggagcgcgatggcaaaaaatttggcattggttcaagtggtagcgtcaccctcttaaccttaaaggccttatcggcctattatcagattactttaaccccagagttactctttaaactagcggcttataccttgcttaagcaaggagataatgggtctatgggggatattgcctgtatcgcttatcagactttagtcgcctatacctcctttgaccgagaacaggtcagtaattggctgcagaccatgcccttaaaaaaacttctcgtcaaagattggggttaccatatccaagtcattcaaccagccctgccttgtgactttttggttggctggactaaaatacctgctatttcaaggcagatgattcaacaagtgacagcgagcattaccccagctttcttaagaacaagttaccagctaacgcaatcagctatggtagctttgcaagaaggtcataaggaagaactcaagaaaagtttagcaggagcaagtcatctcctaaaagagcttcatccagctatctaccatcctaagctagtaaccttggtagctgcttgtcagaagcaagatgctgttgctaaatcttcaggttctggtggtggagattgtggcatcgcgcttgcctttaatcaggatgctagagatacccttatttccaaatggcaagaagctgatatcgcattactttatcaagaaaggtggggagagaatgactaa

SEQ ID NO: 964 - protein, 335 aa, Streptococcus pyogenes
MSNYCVQTGGKLYLTGEYAILTPGQKALIHFIPLMMTAEISPAAHIQLASDMFSHKAGMTPDASYALIQATVKTFADYLGQSIDQLEPFSLIITGKMERDGKKFGIGSSGSVTLLTLKALSAYYQITLTPELLFKLAAYTLLKQGDNGSMGDIACIAYQTLVAYTSFDREQVSNWLQTMPLKKLLVKDWGYHIQVIQPALPCDFLVGWTKIPAISRQMIQQVTASITPAFLRTSYQLTQSAMVALQEGHKEELKKSLAGASHLLKELHPAIYHPKLVTLVAACQKQDAVAKSSGSGGGDCGIALAFNQDARDTLISKWQEADIALLYQERWGEND

SEQ ID NO: 965 - DNA, 990 bp, Streptococcus pyogenes
atgactaaccgtaaagatgatcacatcaaatatgctctcaagtaccaatcgccttataatgcttttgatgacatagaactcatacaccattccttacctagctatgatttgtctgatattgatctcagtactcattttgctgggcaagacttcgactttcccttttacatcaatgccatgacaggaggaagtcaaaaaggcaaagctgtcaatgaaaaattggccaaagtagcagcagcaacagggattgtcatggtgacagggtcttatagcgctgctttaaaaaatcctaacgacgattcctatcgtttacatgaggtggcagataacttgaaactagccacgaatattggtctagataaacctgtggcgctaggacaacaaacggttcaagaaatgcagcccctctttttacaggttcatgtgaatgtgatgcaagagttgctgatgccagagggtgagcgcgtctttcatacctggaaaaaacacctcgctgaatacgctagtcaaataccagttcctgtcattctcaaagaagttggttttggcatggatgtcaatagtatcaagctagcacatgacctaggcattcaaacctttgatatttcaggtagaggaggaacttcatttgcttacattgaaaatcaaagagggggagaccgctcttacttaaacgattggggacaaaccactgttcagtgcttactgaatgcacaaggactgatggaccaagtggaaatcttagcttcgggtggtgtcagacaccccttggacatgattaagtgttttgtcttaggagcacgtgcagtgggactctcacgcaccgttttagaattggtcgaaaaatacccaaccgagcgtgtgattgctatcgttaatggctggaaagaagaattaaaaatcattatgtgtgctcttgactgtaaaactattaaagaattaaagggagtcgactacttactatatggacgcttgcagcaggtcaattag

SEQ ID NO: 966 - protein, 329 aa, Streptococcus pyogenes
MTNRKDDHIKYALKYQSPYNAFDDIELIHHSLPSYDLSDIDLSTHFAGQDFDFPFYINAMTGGSQKGKAVNEKLAKVAAATGIVMVTGSYSAALKNPNDDSYRLHEVADNLKLATNIGLDKPVALGQQTVQEMQPLFLQVHVNVMQELLMPEGERVFHTWKKHLAEYASQIPVPVILKEVGFGMDVNSIKLAHDLGIQTFDISGRGGTSFAYIENQRGGDRSYLNDWGQTTVQCLLNAQGLMDQVEILASGGVRHPLDMIKCFVLGARAVGLSRTVLELVEKYPTERVIAIVNGWKEELKIIMCALDCKTIKELKGVDYLLYGRLQQVN

SEQ ID NO: 967 - DNA, 1176 bp, Streptococcus pyogenes
atgacaattggaattgataagattggttttgcaaccagtcaatatgtcttgaaattggaagatttagcgcttgcacgccaagtggatccagcaaaatttagtcaagggctactcattgagtcttttagtgtggcaccaatcactgaagacattattactttagctgcttctgcagcagatcaaattttaaccgacgaagatcgagctaagattgatatggttattttggcaactgaatcgagtactgatcagtcaaaggcatcagctatctatgtacatcacttagttggtatccagccttttgcacgttcctttgaagtaaaacaagcctgctatagcgcaactgctgctctagactatgctaaactgcatgtggcttctaagccagattctcgtgtccttgttattgctagtgatattgctagatacggtgtaggatctcctggggaatcgactcaaggctctggtagtattgctcttttggtaactgctaaccctcgtattcttgctctaaatgaagataatgtggctcaaactagggatattatggacttttggaggcctaactatagtttcacaccttatgttgatggtatttactctaccaagcaatatctcaattgcttagaaaccacgtggcaagcttatcagaaaagagaaaaccttcagttatctgatcttgctgcagtttgtttccatattccatttcccaagttagccctaaaaggtctaaataacattatggataacacagtacctcctgaacacagggaaaaactaatagaagcctttcaagcttctattagttatagcaaacaaattggaaatatttatactggctcactttatctaggattgttatctttacttgaaaatagtaaagtattacaatctggagataaaattggtttttttagctatggttccggtgccgtaagtgaattttattccggtcagttagttgctgggtacgataaaatgttaatgactaatcgacaagctttactggatcaacgaacacgtctttctgtttctaaatacgaagaccttttctacgaacaagtccaattagatgataatggtaatgccaattttgacatttacttaactggaaaatttgctctaacagccatcaaggagcatcgaaggatctatcataccaatgacaaaaactaa

SEQ ID NO: 968 - protein, 391 aa, Streptococcus pyogenes
MTIGIDKIGFATSQYVLKLEDLALARQVDPAKFSQGLLIESFSVAPITEDIITLAASAADQILTDEDRAKIDMVILATESSTDQSKASAIYVHHLVGIQPFARSFEVKQACYSATAALDYAKLHVASKPDSRVLVIASDIARYGVGSPGESTQGSGSIALLVTANPRILALNEDNVAQTRDIMDFWRPNYSFTPYVDGIYSTKQYLNCLETTWQAYQKRENLQLSDLAAVCFHIPFPKLALKGLNNIMDNTVPPEHREKLIEAFQASISYSKQIGNIYTGSLYLGLLSLLENSKVLQSGDKIGFFSYGSGAVSEFYSGQLVAGYDKMLMTNRQALLDQRTRLSVSKYEDLFYEQVQLDDNGNANFDIYLTGKFALTAIKEHRRIYHTNDKN

SEQ ID NO: 969 - DNA, 840 bp, Streptococcus pyogenes
atgacaaaagctgaccagatttttaaagctaatattcaaaaaattataaacgaaggatcattgagtgagcaagcacgtcctaaatataaagatggtcgaacagctcattctaagtatattactggggcgtttgctgaatatgatttagctaaaggagagtttcccatcacaactttacgacccattccaattaaatctgctataaaggaattattttggatatatcaagatcagtctaacagtttagatgtgctagaagctaaatataatgttcattattggaatgaatgggaagttgaccagacacgtactattgggcaacgttatggtgctgtagtcaaaaaacatgatatcatctcaaaaatactaaagcaattagcagaaaatccttggaatcgtcgtaatgtcatttctctctgggactatgaagcatttgaggagacaaaagggttgttgccatgtgcctttcaaatcatgtttgatgttagacgtgtaggggaagatctttatttagatgctagtttgacgcaacgttctaatgacatattagttgctcatcacatcaatgccatgcaatacgttgccttgcagatgatgattgctaaacattttggatggaaaataggtaagttcttttattttgttaacaatttacatatttatgacaaccaatttgatcaggctcaagaattgctaaaacgacagccagttgctagtcagcctaagcttgttttaaatgttccagataggactaatttctttgatattaaaccagatgattttgaattacaaaattatgatccagtgaagcctcagttgcactttgaccttgctatttaa

SEQ ID NO: 970 - protein, 279 aa, Streptococcus pyogenes
MTKADQIFKANIQKIINEGSLSEQARPKYKDGRTAHSKYITGAFAEYDLAKGEFPITTLRPIPIKSAIKELFWIYQDQSNSLDVLEAKYNVHYWNEWEVDQTRTIGQRYGAVVKKHDIISKILKQLAENPWNRRNVISLWDYEAFEETKGLLPCAFQIMFDVRRVGEDLYLDASLTQRSNDILVAHHINAMQYVALQMMIAKHFGWKIGKFFYFVNNLHIYDNQFDQAQELLKRQPVASQPKLVLNVPDRTNFFDIKPDDFELQNYDPVKPQLHFDLAI

SEQ ID NO: 971 - DNA, 441 bp, Streptococcus pyogenes
atggaagaaatcacgatttatcataatccaaactgtggcacttcacgtaatgttcttgccatgattcgccatgcaggtattgagcctactattattgagtatttgcagacgccacctaatcgggagactttaattgagctcttacaatcgatgggaatctctgcaagagaactcttgcgaaccaatgttcctgaatttgaggcttatggattagcaaatcaagcagtagctgagaaagacattattaatgccatgttggcggatccaattttgatcaatcgtcctattgttgtgactcgcaaaggagtaaaactttgccgtccttctgagaccttactggatattcttcctgttcccctgcctagtccttatattaaagaggatggcgagagtgtgaaccctattgaggtaaaaggagaaaaagatgtcattgatgactaa

SEQ ID NO: 972 - protein, 146 aa, Streptococcus pyogenes
MEEITIYHNPNCGTSRNVLAMIRHAGIEPTIIEYLQTPPNRETLIELLQSMGISARELLRTNVPEFEAYGLANQAVAEKDIINAMLADPILINRPIVVTRKGVKLCRPSETLLDILPVPLPSPYIKEDGESVNPIEVKGEKDVIDD

SEQ ID NO: 973 - DNA, 789 bp, Streptococcus pyogenes
atgactaataatcaaacactagacatccttttggatgtctatgcttataatcacgcctttagaattgctaaagccttgccaaatatccctaaaactgccctctatttactagagatgttaaaagagcgcagagaattgaaccttgcctttctagcggaacatgcagcagagaatcggaccattgaagaccagtatcactgttcattatggcttaaccaatcgcttgaagatgagcagattgccaattacattttggatttagaagttaaagtaaaaaacggtgctattattgatttcgtcaggtcagtgtcgcctattctttaccgactttttctcagactaatcacgtcagaaattccaaacttcaaggcttatatttttgatacaaagaatgaccaatatgatacctggcattttcaggccatgttggaatctgatcacgaggttttcaaggcttacctgtctcaaaagcagtctcgcaatgtgacgaccaaaagcttagcagacatgttgacgttgacctccttacctcaggaaatcaaggacttggtttttttgttacgacattttgaaaaggctgtccgtaatcctctggctcatttgattaagccttttgatgaagaggaactgcatcgcaccactcatttttcttctcaggcttttttggaaaacattatcaccttggcgactttttctggtgtaatctaccgacgtgagcctttttactttgatgacatgaatgccattattaaaaaggagttgagcctttggagacaatctattgtctga

SEQ ID NO: 974 - protein, 262 aa, Streptococcus pyogenes
MTNNQTLDILLDVYAYNHAFRIAKALPNIPKTALYLLEMLKERRELNLAFLAEHAAENRTIEDQYHCSLWLNQSLEDEQIANYILDLEVKVKNGAIIDFVRSVSPILYRLFLRLITSEIPNFKAYIFDTKNDQYDTWHFQAMLESDHEVFKAYLSQKQSRNVTTKSLADMLTLTSLPQEIKDLVFLLRHFEKAVRNPLAHLIKPFDEEELHRTTHFSSQAFLENIITLATFSGVIYRREPFYFDDMNAIIKKELSLWRQSIV

SEQ ID NO: 975 - DNA, 642 bp, Streptococcus pyogenes
atgaaattactactttttattaccattgcctatttacttggttctattccaactggactatggattggacagtacttttaccacatcaacttacgagagcatggatcaggaaatactggaaccacaaatacttttcggattttaggtgtcaaggcaggaacagctaccttagctattgatatgtttaaagggacactttcaatattgttaccaattatttttggtatgacttcaatttcatccattgctatcggctttttcgcagttttagggcatacttttcctatttttgccaactttaaaggtggtaaggccgtagcaacaagtgctggtgtattgctaggctttgctccgttatatctcttttttttagcatctatctttgttttagttctctatttatttagtatgatatctttagctagtgtggtttcagctatcgttggtgtgttatctgttttaacatttcctgccattcattttcttttaccaaattatgactactttttaacttttattgtgatattacttgcgttcattattattataagacacaaagataacattagtcgtatcaaacatcatactgaaaatctaataccttgggggctaaatttaagcaaacaagtgcctaaaaaataa

SEQ ID NO: 976 - protein, 213 aa, Streptococcus pyogenes
MKLLLFITIAYLLGSIPTGLWIGQYFYHINLREHGSGNTGTTNTFRILGVKAGTATLAIDMFKGTLSILLPIIFGMTSISSIAIGFFAVLGHTFPIFANFKGGKAVATSAGVLLGFAPLYLFFLASIFVLVLYLFSMISLASVVSAIVGVLSVLTFPAIHFLLPNYDYFLTFIVILLAFIIIIRHKDNISRIKHHTENLIPWGLNLSKQVPKK

SEQ ID NO: 977 - DNA, 2460 bp, Streptococcus pyogenes
atgtcaaacattcaaaacatgtcccttgaggatattatgggagaacgcttcggccgttattccaagtatattattcaggaacgggcacttcctgatattcgagatggattgaaacccgttcagcgtcggattctttattcgatgaataaggatggcaatacttttgaaaaaggttaccgtaaatcagccaaatcagttggtaatattatggggaatttccacccacatggggattcctctatttatgatgccatggtacggatgagtcaagattggaagaaccgtgaaatccttgttgaaatgcacggaaataatggttcaatggatggtgatccgcctgcggctatgcgttatacagaagctcgcttgtctgaaattgcgggttatcttcttcaagacattgagaaaaatacggtctcttttgcttggaactttgatgacacagaaaaagaacccaccgttttaccagcagcttttcctaacttacttgtcaatgggtcttctggtatttccgcaggctatgcgacagatattccaccgcacaatttgtcagaagtgattgatgctgttgtgtatatgattgatcatcccaaagctagtttagagaaattaatggagtttttaccaggaccagatttcccgacaggaggcattatccaaggagctgacgaaatcaaaaaagcctacgaaacaggtaagggacgtgtcgttgttcgctctaggacagaaatcgaggaacttaaaggtggtaaacaacaaattattgtcactgagattccttatgaagttaacaaagcagtcttggtcaaaaagattgacgatgtgcgtgttaacaataaagtcccaggcatcgtagaagtacgcgatgaatctgatcgcacaggtcttcgcatagctattgagttgaaaaaagaggctgatagccaaaccattctaaattatttgttgaaatacacagaccttcaagttaattataattttaacatggttgctattgaccacttcacaccacgtcaagtaggacttcaaaaaatactatcaagctatatcagtcaccgtaaagatattattattgagcggtctaaattcgataaagccaaagctgaaaaacgcctccacattgttgaaggattgattcgtgtcttgtccatcttagatgagattattgctttgattagatcgtctgacaataaggctgatgctaaagaaaatctgaaagtcagctatgatttctctgaggaacaagcagaagcgattgtaaccttgcagctttatcgtttaactaataccgatattgttactctccaaaatgaagaaaatgatttaagagacttaatcacgaccctttccgctattatcggtgacgaagcaaccatgtataacgtcatgaaacgtgaattaagagaggtgaaaaagaaattcgccaatcctcgtttatcagagttacaagcagaaagtcaaatcattgagattgacactgccagcttgattgcagaggaagaaacttttgttagtgtgacacggggcggatacctcaaaagaaccagcccacgatccttcaatgcgtctagtttggaagaagttggcaagagagatgatgacgaactcatcttcgttaaacaggccaaaacaacagaacaccttttgttatttacaactttaggcaatgtcatttaccggccaatccatgaattgaccgatttacgttggaaggatatcggtgaacatttatcacaaaccatttcaaacttcgcgacagaagaagagattctctacgctgatattgtgacttcctttgaccagggcttgtatgtggctgtcacacaaaatggttttatcaaacgctttgatcgtaaagaactaagtccttggcgaacttataaatctaaatcaaccaaatatgtgaagctaaaggatgacaaagaccgcgtggttaccttgtcaccagttattatggaagacctcctattagtgactaaaaatggttatgctttgcgattctccagtcaggaagtgcctattcaagggttgaaatctgctggtgttaaaggcattaacttgaaaaacgatgacagccttgcctcagcctttgctgtgacaagtaactctttctttgtcttaactcagaggggttctctcaaacggatggctgtcgatgatattcctcagacaagtcgtgccaatcgtggactattggtcctacgagagttaaaaaccaaacctcatagagtttttctggccggaggcgttcaatcagatacttcagctgagcagtttgatttgttcactgatatacctgaagaagaaactaatcaacaaatgcttgaagtcattagtaagactggtcaaacctacgagattgctttagaaacgctttcgttatcggaaagaatcagcaacggctcctttatttcagacactatttcggatcaagaagtactggtagctagaacacgttaa

SEQ ID NO: 978 - protein, 819 aa, Streptococcus pyogenes
MSNIQNMSLEDIMGERFGRYSKYIIQERALPDIRDGLKPVQRRILYSMNKDGNTFEKGYRKSAKSVGNIMGNFHPHGDSSIYDAMVRMSQDWKNREILVEMHGNNGSMDGDPPAAMRYTEARLSEIAGYLLQDIEKNTVSFAWNFDDTEKEPTVLPAAFPNLLVNGSSGISAGYATDIPPHNLSEVIDAVVYMIDHPKASLEKLMEFLPGPDFPTGGIIQGADEIKKAYETGKGRVVVRSRTEIEELKGGKQQIIVTEIPYEVNKAVLVKKIDDVRVNNKVPGIVEVRDESDRTGLRIAIELKKEADSQTILNYLLKYTDLQVNYNFNMVAIDHFTPRQVGLQKILSSYISHRKDIIIERSKFDKAKAEKRLHIVEGLIRVLSILDEIIALIRSSDNKADAKENLKVSYDFSEEQAEAIVTLQLYRLTNTDIVTLQNEENDLRDLITTLSAIIGDEATMYNVMKRELREVKKKFANPRLSELQAESQIIEIDTASLIAEEETFVSVTRGGYLKRTSPRSFNASSLEEVGKRDDDELIFVKQAKTTEHLLLFTTLGNVIYRPIHELTDLRWKDIGEHLSQTISNFATEEEILYADIVTSFDQGLYVAVTQNGFIKRFDRKELSPWRTYKSKSTKYVKLKDDKDRVVTLSPVIMEDLLLVTKNGYALRFSSQEVPIQGLKSAGVKGINLKNDDSLASAFAVTSNSFFVLTQRGSLKRMAVDDIPQTSRANRGLLVLRELKTKPHRVFLAGGVQSDTSAEQFDLFTDIPEEETNQQMLEVISKTGQTYEIALETLSLSERISNGSFISDTISDQEVLVARTR

SEQ ID NO: 979 - DNA, 1023 bp, Streptococcus pyogenes
atgacaatagcaattgattgggacaacctaggatttgaatatcataagttgccatttcgttacatttcttattacaaaaatggtcaatgggataaaggtcaattaacagaagatgccaccttacatatctcagaaagcgctccagcgcttcattatggacaacaagcttttgaaggcttaaaggcttatcgcaccaaagatggctctattcaactatttagaccagaccgtaatgcagtgcgtttacaagccacagcagaccgcttgttgatgccacaagtatcaacagagcaatttattgatgcagctaagcaagtggttaaagccaatgaagactttgtaccaccttacggaacaggtgcaacgctttacctgagaccgttattaattggagttggagatattattggggttaaaccagccgaagaatatattttcaccatttttgccatgccagtaggaaactatttcaaaggtggacttgctccaactaattttattgtttctgaagcgtttgaccgcgccgctccttacggaacaggtgctgctaaggtgggaggaaactatgcaggaagtttgctaccaggtaaggccgctaaatcagcaggcttttctgatgtgatttacttagatccagcaacccatactaaaattgaagaagtcggagctgcaaacttttttggcattactgcaaataatgaatttgttacgccacttagtccatccatcttgccatctattacgaagtattcactcttacaactagctgaagaaagacttggtatgacagtaattgagggtgatgttccaattaatgaattggataaatttgtggaagcaggagcttgtggaacagcagctgttatctctccaattggcggtatccagtacaaggataacttacatgtcttttacagtgaaacagaagttggtcctgtgacacgccgtttatacgatgagttggtcggcattcaatttggggatattgaagcaccagaaggttggattgtaaaagtagattaa

SEQ ID NO: 980 - protein, 340 aa, Streptococcus pyogenes
MTIAIDWDNLGFEYHKLPFRYISYYKNGQWDKGQLTEDATLHISESAPALHYGQQAFEGLKAYRTKDGSIQLFRPDRNAVRLQATADRLLMPQVSTEQFIDAAKQVVKANEDFVPPYGTGATLYLRPLLIGVGDIIGVKPAEEYIFTIFAMPVGNYFKGGLAPTNFIVSEAFDRAAPYGTGAAKVGGNYAGSLLPGKAAKSAGFSDVIYLDPATHTKIEEVGAANFFGITANNEFVTPLSPSILPSITKYSLLQLAEERLGMTVIEGDVPINELDKFVEAGACGTAAVISPIGGIQYKDNLHVFYSETEVGPVTRRLYDELVGIQFGDIEAPEGWIVKVD

SEQ ID NO: 981 - DNA, 231 bp, Streptococcus pyogenes
atgagtaaaaaagataaaaaaattgaaatccaactgattgatcacaaagttatggttaatgagactaagattgatggctatcaattacaaattggtaaacgtgtggttggagaaattgcagaacttgatgagaaatttgctgtcttaaaaaatgatggagtagattgcttcttcaaaacgctcgaacaagcggttgaaaatatcattgaaaactacaatttgaaccattaa

SEQ ID NO: 982 - protein, 76 aa, Streptococcus pyogenes
MSKKDKKIEIQLIDHKVMVNETKIDGYQLQIGKRVVGEIAELDEKFAVLKNDGVDCFFKTLEQAVENIIENYNLNH

SEQ ID NO: 983 - DNA, 909 bp, Streptococcus pyogenes
atgaaacaccttaaaaccccaccattggtcatgtcaggattggcattaggaacgttgtcatttggcaatttgttggctacttatgtttcgatttttaattatttgggaattctggcagctctttttatctatggtatcttgcttgttggcatggttaggaaccttaacgataccaaaatgcagttacgacaacctctaattgcctctgtttttccaactttttttatgacagggatgttgttgtcttcactctttctcaaagtgacaggagggtgttggttaggctttctcacttggtggctattctttttgggaaatcttgtcctgattgcttattaccagtatcgttttgtcttttctttttcatgggataacgtttttccttcctggtccgtgctttttgttggaattgcaatggcggcattaacagcacctgctagtaggcagtttttattaggacaggtgattttttgggtttgtcttctcttaactgctgtgattttaccttttatggccaaaaagacttatgggattggtctaggtcaagcagtaatgcccaatatttcaacgttttgtgcccctctgtccttactttcagcgtcttatttagcaacctttcctagaccacaagtaggaatggttatctttcttctcgtcagctcacaactgttatatgcttttgtggttgtacagcttcctcgcttactcaatcgtccctttaacccaggtttttcagcttttacctttccgtttgtgattagtgccacttccttaaaaatgaccttatcttttttaggttggcaaggtttaggttggcaggttcttttgctaggagaggtattgttggcgacagctttagtcacttatgtttatggggcttacctgagatttctatttcaaaataagtaa

SEQ ID NO: 984 - protein, 302 aa, Streptococcus pyogenes
MKHLKTPPLVMSGLALGTLSFGNLLATYVSIFNYLGILAALFIYGILLVGMVRNLNDTKMQLRQPLIASVFPTFFMTGMLLSSLFLKVTGGCWLGFLTWWLFFLGNLVLIAYYQYRFVFSFSWDNVFPSWSVLFVGIAMAALTAPASRQFLLGQVIFWVCLLLTAVILPFMAKKTYGIGLGQAVMPNISTFCAPLSLLSASYLATFPRPQVGMVIFLLVSSQLLYAFVVVQLPRLLNRPFNPGFSAFTFPFVISATSLKMTLSFLGWQGLGWQVLLLGEVLLATALVTYVYGAYLRFLFQNK

SEQ ID NO: 985 - DNA, 1239 bp, Streptococcus pyogenes
atgattgagacaaagcgtcagcaagaaagagtgattcttttaggagttgagcttcagacaacagaacattttgacatgtccatgacagaattagctaatcttgccaaaacagctggtgtcaaagttatggcaagtttcagccaaaaacgagaacgttacgacagcaaaacctttatcggctcagggaaactggatgagattaaggcgattgtggaagctgatgagattgatgcagttattgtgaacaatcggttgactgctaggcaaaatgctaatctagaagctgttttagaggtaaaagtcattgaccgtatgcagttaatcttagatatttttgccatgcgtgccagaagccatgagggcaaattacaagtacaccttgcccaattgaaatatatgttacctcgtttggttggacagggcatcatgttaagtcgtcaagcaggtggtattgggagccgtggaccaggtgaaagccaactagagttaaatcgccgttcgattcgtcatcagattgctgatattgaacgccaattaactcaggtagagaaaaatcgtcaaacaattagagatcgtcgtgtgggttcagatacctttaaaattggcttgattggctacaccaatgctggcaagtcaaccattatgaacttgttgacagatgacagccactatgaagccaatgaattatttgctaccttagatgcaactacaaagcaactctatttagaaaatcaatttcaagcaaccttaacagacaccgtaggctttattcaagacttgccaacggaattagtggctgcttttaaatcaaccctagaagaaagcaaatatgtggatttgctgttacatgtgattgatgcgagtgatcccaatcatagtgagcaagaaaaagtggttttaaaccttctaaaagagctagacatgcttaatattccgcgtttagctatttataacaaggtggatatagcagaacaattcacagctactgcttttccaaatatcaggatttcagcccgttcaaaggatagcaaaattctcttgagacgtttaatcattgaccaaattcgagaccagtttgttccttttagaatcaaagtgcatcaagacaaggcgtacaagctatatgatttgaatcgagttgctcttttagaccactacacgtttgaccaagaaatagaggatatttcgggctacatttccccaaaacagcaatggagacttgacgatttttatgaataa

SEQ ID NO: 986 - protein, 412 aa, Streptococcus pyogenes
MIETKRQQERVILLGVELQTTEHFDMSMTELANLAKTAGVKVMASFSQKRERYDSKTFIGSGKLDEIKAIVEADEIDAVIVNNRLTARQNANLEAVLEVKVIDRMQLILDIFAMRARSHEGKLQVHLAQLKYMLPRLVGQGIMLSRQAGGIGSRGPGESQLELNRRSIRHQIADIERQLTQVEKNRQTIRDRRVGSDTFKIGLIGYTNAGKSTIMNLLTDDSHYEANELFATLDATTKQLYLENQFQATLTDTVGFIQDLPTELVAAFKSTLEESKYVDLLLHVIDASDPNHSEQEKVVLNLLKELDMLNIPRLAIYNKVDIAEQFTATAFPNIRISARSKDSKILLRRLIIDQIRDQFVPFRIKVHQDKAYKLYDLNRVALLDHYTFDQEIEDISGYISPKQQWRLDDFYE

SEQ ID NO: 987 - DNA, 636 bp, Streptococcus pyogenes
atgaataattatattgatttagcaaaaacctatggtggatttactagtctggataccaactacctaaaccatctgttagccagtttgacagaccagcaaaaactagcttttatcacaccaccaccaagtgttattaatgcctactttgctgaaatctaccagaaacagtcaccgcaagctgcaactgattattattttaatctttctaaggctttggggctttttactgaccaaccatcttttgaggaagaaaagccctttgtacgcctcaatttgtctggaaaagcttatggttttgcttaccaaaatgaccaagaagttgcattggtattttctgaaaaagcagagcctaagaaacccgaactcttctttgaattaacacaaattttcccacaatatatggtttatgaggacaaaggccagcttaaaatgcaggctaagcagtttgagcaaggagaatgtgaagacattacacctgatgacacactcttgtcgaagatttaccgtctggcaaacggtatcaccatgcttaaggggtttaatgtagaggagttatgggctcttagccaaacattttctggtcaaaagtattatgattttgcccaacgagaatttatgatttacatcacccaatag

SEQ ID NO: 988 - protein, 211 aa, Streptococcus pyogenes
MNNYIDLAKTYGGFTSLDTNYLNHLLASLTDQQKLAFITPPPSVINAYFAEIYQKQSPQAATDYYFNLSKALGLFTDQPSFEEEKPFVRLNLSGKAYGFAYQNDQEVALVFSEKAEPKKPELFFELTQIFPQYMVYEDKGQLKMQAKQFEQGECEDITPDDTLLSKIYRLANGITMLKGFNVEELWALSQTFSGQKYYDFAQREFMIYITQ

SEQ ID NO: 989 - DNA, 789 bp, Streptococcus pyogenes
atgaaagctaaaaccctaattgatgcctatgaagccttttgcccacttgatttatctatggaaggagacgttaaaggtcttcaaatgggttcattggataaagacattcgtaaggttatgattactttagatatccgagagtcaacagtagcagaagccatcaaaaatgaagttgatctcattataactaagcatgctcccatctttaaaccgcttaaagatctggtttcatcccctcagcgtgatatccttctagatttggtcaagcatgacatttctgtctatgtgagccataccaatattgacattgtaccaggtgggctaaatgattggttttgtgacctgctagaaatcaaggaagcaacttacttgtctgaaaccaaagaaggctttggcattggtcgtattggaacagttaaagaacaagcgttagaagagttagcaagtaaggtcaaaagggtgtttgatttagataccgtgcgacttatccgttacgataaggaaaaccctttgatttcaaagattgctatctgtggcggaagtggtggtgaattttatcaggatgctgtgcaaaaaggcgcagacgtttatattacaggggatatctattaccatacagcacaggagatgctgacagaaggactatttgcggttgacccggggcatcatattgaggtgctttttacggagaaattaaaggagaaactccaagggtggaaagaagagaacggttgggatgtcagcattatttcaagcaaagcctcgaccaatccatttagccatttatag

SEQ ID NO: 990 - protein, 262 aa, Streptococcus pyogenes
MKAKTLIDAYEAFCPLDLSMEGDVKGLQMGSLDKDIRKVMITLDIRESTVAEAIKNEVDLIITKHAPIFKPLKDLVSSPQRDILLDLVKHDISVYVSHTNIDIVPGGLNDWFCDLLEIKEATYLSETKEGFGIGRIGTVKEQALEELASKVKRVFDLDTVRLIRYDKENPLISKIAICGGSGGEFYQDAVQKGADVYITGDIYYHTAQEMLTEGLFAVDPGHHIEVLFTEKLKEKLQGWKEENGWDVSIISSKASTNPFSHL

SEQ ID NO: 991 - DNA, 141 bp, Streptococcus pyogenes
atggagaaaatgaaagcacctagcctagaagttaatctacggctaggcgaaaaggaaatcaaggcagttgtttctggatcaactcatcaatcctctgagcaatcaaaggttgaagttgatgagcaaaatcttgagaaatag

SEQ ID NO: 992 - protein, 46 aa, Streptococcus pyogenes
MEKMKAPSLEVNLRLGEKEIKAVVSGSTHQSSEQSKVEVDEQNLEK

SEQ ID NO: 993 - DNA, 228 bp, Streptococcus pyogenes
atggatccattaaaaattaacataaagtttgacggcgatttccgtcaagttgttttaaaacttgcaaatacttttgaaccttctgaattgccacaattagacagttttagtaatctgcaagaactaacagaagagctttcgatttctatttctcaagattttgctcatcaacttcaacctttgattgctcagaggattgatgagttgatccagaaacaactgccttga

SEQ ID NO: 994 - protein, 75 aa, Streptococcus pyogenes
MDPLKINIKFDGDFRQVVLKLANTFEPSELPQLDSFSNLQELTEELSISISQDFAHQLQPLIAQRIDELIQKQLP

SEQ ID NO: 995 - DNA, 237 bp, Streptococcus pyogenes
atgatttttttcttcctttctgttgtctcaaaacatatcaaccaaaatttcaatgttgacaaccaattagttgaatttgtcgttgcggaacttaatcaaatgaatgcacctattacacaaaagcaagctcagcatatcgttaatattttggagtatgtctctaagtcaacctctaaatctactatcgcagctatgacaaatgcattgttagagcttggcgtacttaagggagattga

SEQ ID NO: 996 - protein, 78 aa, Streptococcus pyogenes
MIFFFLSVVSKHINQNFNVDNQLVEFVVAELNQMNAPITQKQAQHIVNILEYVSKSTSKSTIAAMTNALLELGVLKGD

SEQ ID NO: 997 - DNA, 339 bp, Streptococcus pyogenes
atggaacaaatcaaaattacagaaacaggaatggtcgttataagcgataaagcactcaaaacttttgtgattgcaggacatttatcggagaggtgggaatttacctctaaatttaaaaaattagatgagccatcacttgatgaaaacggagatttgtttgagcctgtatacgagttgatgcttgaagccaggtcgaagggacaaattagcataacatcatcatattgtggcaaaaatcacaaaaaagacacagacgaaatcataaaagtattctcgtttatcgaagataacaagagaaatatttttgaaaaccttggtattcgtggggtgcttgaatga

SEQ ID NO: 998 - protein, 112 aa, Streptococcus pyogenes
MEQIKITETGMVVISDKALKTFVIAGHLSERWEFTSKFKKLDEPSLDENGDLFEPVYELMLEARSKGQISITSSYCGKNHKKDTDEIIKVFSFIEDNKRNIFENLGIRGVLE

SEQ ID NO: 999 - DNA, 462 bp, Streptococcus pyogenes
atgaaaaaaggaaggtttaaaagaaactggccgattatactatttggtataatagtttttatatttagtttttattttaaaatttctccaaaaagtttaaaaaattttactgatataatgtcggcatctctatcattttcagcaattgtaaccgcaatattctttgctagtttttcattgataccaacttccggttctaataaattagtagtgatgatggaagatttagggacagagataaaaataatggaccgcctattagttgctacttttttatctttcattagttctttattatcttttatttctctattctttagtaagactgatactgatttaatttcaattttagtagtttcaagttggttgagctcaacagtaatgatgttcctaagttcgttctttgtgctaagaacattaattttgttagttgaaacttataataatttcaaaaataaatag

SEQ ID NO: 1000 - protein, 153 aa, Streptococcus pyogenes
MKKGRFKRNWPIILFGIIVFIFSFYFKISPKSLKNFTDIMSASLSFSAIVTAIFFASFSLIPTSGSNKLVVMMEDLGTEIKIMDRLLVATFLSFISSLLSFISLFFSKTDTDLISILVVSSWLSSTVMMFLSSFFVLRTLILLVETYNNFKNK

SEQ ID NO: 1001 - DNA, 483 bp, Streptococcus pyogenes
atggattggaggtggtggaaaatcgcatacgaggaattaaccgaaaaacaacagcgttttgtggataagtacatcaccacatttaacgctactgagtctgcaaaacaagctggatattctgaaaaaagcgcttatagccaaggtcaacgcttgttgaaaaatgttgaaattcaaaaagcaatgaaggaacgttttttggaggcaaaagatactaaaggagaccgtattcaagatgttgcagaaacgttggaacaagatacatcgatagcccgtggagaaatccaaatatctgaattcaaagaaacagatatgctgacaggtcaagtggttatccacacgaaaagagaatataccccaagtcacgaagaacagggtagggctagggatagaatttataaagttaatggagcttactcagaaaaacgtgaattagagcattctggaacggtggtgtttgcaaatgaagacaacatccctgattaa

SEQ ID NO: 1002 - protein, 160 aa, Streptococcus pyogenes
MDWRWWKIAYEELTEKQQRFVDKYITTFNATESAKQAGYSEKSAYSQGQRLLKNVEIQKAMKERFLEAKDTKGDRIQDVAETLEQDTSIARGEIQISEFKETDMLTGQVVIHTKREYTPSHEEQGRARDRIYKVNGAYSEKRELEHSGTVVFANEDNIPD

SEQ ID NO: 1003 - DNA, 1290 bp, Streptococcus pyogenes
atgaagacaacatccctgattaaagtagatttgccatcaacaatcggtataggttatggcgctttttggcggtctagaaatttttatcgagtagttaaaggcagccgtggatctaaaaaatctaaaacgactgctttaaattttatcgtcagactgctgaagtacccttgggctaacttattggtcatccgtagatactcaaacactaacaaacaatctacttataccgattttaaatgggcgtgtaatcaattaaaggttacacacctttttaagtttaatgagagtttgccagaaataactgtaaaggcaacgggccaaaagatactgttccgtggacttgatgatgagttaaaaatcacatctattactgtcgatgttggcgctttgtgctgggcttggtttgaagaggcttatcaaattgagaccgaagataagttttcaacagttgtcgaatcaatccgcggtagtttagatgctcctgatttttttaaacagataacagtcacgtttaacccgtggtcagaaagacattggcttaaacgtgtcttttttgatgaagaaactaaacgggctgatacattttctgggactacaacatttagagtaaacgaatggcttgatgatgtcgataaaagacgctacgaagatttgtacaagactaatccaaggcgggctagaatcgtgtgcgatggtgaatggggcgttgctgaaggtcttgtttttgataactttgaagtcgtagattttgatgttgaaaaaacaattcaacgcgttaaagagacctcggccggtatggactttgggtttactcaagaccctacaactcttatatgtgttgcagttgacctcgcaaacaaagagttatggctttacaacgaacattatcaaaaggctatgttaacagatcatattgtcaaaatgataagagataaaaacttgcataggtcttacatcgcaggggatagcgccgaaaaacgcctcattgcagaaataaaaagtaaaggggtgtctggaattgtcccgagtattaaaggtaaagggtcaatcatgcaagggattcaattcatgcaggggtttaagatatatattcacccatcttgcgaacacacaatagaagagtttaatacttacacttttaagcaagacaaagaaggtaattggttaaacgaaccgatagataagaataaccacgttattgatgcgattagatatgcgcttgaaaaataccatatcagaagcaacgagtcaaatcagtttgaagttcttagggctggttttggttactag

SEQ ID NO: 1004 - protein, 429 aa, Streptococcus pyogenes
MKTTSLIKVDLPSTIGIGYGAFWRSRNFYRVVKGSRGSKKSKTTALNFIVRLLKYPWANLLVIRRYSNTNKQSTYTDFKWACNQLKVTHLFKFNESLPEITVKATGQKILFRGLDDELKITSITVDVGALCWAWFEEAYQIETEDKFSTVVESIRGSLDAPDFFKQITVTFNPWSERHWLKRVFFDEETKRADTFSGTTTFRVNEWLDDVDKRRYEDLYKTNPRRARIVCDGEWGVAEGLVFDNFEVVDFDVEKTIQRVKETSAGMDFGFTQDPTTLICVAVDLANKELWLYNEHYQKAMLTDHIVKMIRDKNLHRSYIAGDSAEKRLIAEIKSKGVSGIVPSIKGKGSIMQGIQFMQGFKIYIHPSCEHTIEEFNTYTFKQDKEGNWLNEPIDKNNHVIDAIRYALEKYHIRSNESNQFEVLRAGFGY

SEQ ID NO: 1005 - DNA, 171 bp, Streptococcus pyogenes
atgaacttgactgacaaaaagaaaatggggcgacctactagcgaccctaagactgttaaattgactgttagaattaacgaggatacgaacaaaactttggaagaatattgtaagaataataatgtttccaaagctgacggtgttagagaagctattagtcgtctgaaataa

SEQ ID NO: 1006 - protein, 56 aa, Streptococcus pyogenes
MNLTDKKKMGRPTSDPKTVKLTVRINEDTNKTLEEYCKNNNVSKADGVREAISRLK

SEQ ID NO: 1007 - DNA, 534 bp, Streptococcus pyogenes
atggcagaagaaacacaaacagttgaaacggttgaagagcaagtggtaccagaagcaaaacaaccgcaagacgaaaaaaagtacacagatgcagatgtggacgctatcatcgacaaaaagtttgcgaagtggaagtcagaacaagaagcggagaaatcggaagctaaaaaaatggctaagatgaatgaaaaagagaaagcagactacgaaaagcagaagctgttagacgaattgcaagagctaaaaaacgataagacacgcaatgagttaacagcagtagctcgtcaaatgtttgcagaatctgaaatcaacgtcaacgatgacgtacttggtttagttgtgactttggacgcagaacaaacaaaagcaaatgtaacaacgctagcaaacgcatttgctaaagttatcgctgatgaccgcaaggctcttgtacgccagactactccgtcaacaggtggtggattgagcaaacaaaccaattacggtgctaacttggctagtaaggcagcacaacaaagcaccaaacttttttag

SEQ ID NO: 1008 - protein, 177 aa, Streptococcus pyogenes
MAEETQTVETVEEQVVPEAKQPQDEKKYTDADVDAIIDKKFAKWKSEQEAEKSEAKKMAKMNEKEKADYEKQKLLDELQELKNDKTRNELTAVARQMFAESEINVNDDVLGLVVTLDAEQTKANVTTLANAFAKVIADDRKALVRQTTPSTGGGLSKQTNYGANLASKAAQQSTKLF

SEQ ID NO: 1009 - DNA, 354 bp, Streptococcus pyogenes
atggcaaatgtaaacacatttagcattgtaaaaaatgtcaagctcgatttaggcattgaggacgacaatcaagaccagttgttggagatgttgctaaatcgtattacagaccacttcaaagcaaattatggcgtgttagaaattgacaatgctttttcttttgtcttggaagattgtctgattgctcgttttaaccgtagaggttcagagcgtgccaaaacagaggaagtggaaggtcataaaacaacctactacgaccatttgaatgagtttgaaccctacgatgccatgattatggcaaagcttaatttaatcaaagacaaatctcgtaaagggggactgtactttttatga

SEQ ID NO: 1010 - protein, 117 aa, Streptococcus pyogenes
MANVNTFSIVKNVKLDLGIEDDNQDQLLEMLLNRITDHFKANYGVLEIDNAFSFVLEDCLIARFNRRGSERAKTEEVEGHKTTYYDHLNEFEPYDAMIMAKLNLIKDKSRKGGLYFL

SEQ ID NO: 1011 - DNA, 678 bp, Streptococcus pyogenes
atgagtagtgtgggagttattaatttaaggaatttatactctacatatgatccaacagaagtaaaaggaaaaataaatgaaggtccgccattttcaggtagtttgttctacaaaaatattccttatggcaatagttcgattgaattaaaagtagaacttaatagcgtagaaaaagctaattttttttctggtaaaagggtggatatatttactttggagtattctcctccctgtaactctaatataaaaaagaattcatatggaggtattactttaagcgacggtaatagaattgataaaaaaaatatacctgttaatattttcatagacggcgttcaacaaaaatatagctatacagatataagtacagggagtactgataagaaagaggttacgattcaggaacttgatgtgaaatcaagatattatcttcaaaaacattttaatatatacggattcggtgatgttaaagattttggccgctcctctagatttcaatctggctttgaggaaggaaatattatttttcatttgaatagtggagagagaatttcttataatctttttgatacaggacatggtgacagagagagtatgctaaaaaaatacagtgataataagaccgcttattctgatcaacttcatattgatatatacttagttaaatttaataaataa

SEQ ID NO: 1012 - protein, 225 aa, Streptococcus pyogenes
MSSVGVINLRNLYSTYDPTEVKGKINEGPPFSGSLFYKNIPYGNSSIELKVELNSVEKANFFSGKRVDIFTLEYSPPCNSNIKKNSYGGITLSDGNRIDKKNIPVNIFIDGVQQKYSYTDISTGSTDKKEVTIQELDVKSRYYLQKHFNIYGFGDVKDFGRSSRFQSGFEEGNIIFHLNSGERISYNLFDTGHGDRESMLKKYSDNKTAYSDQLHIDIYLVKFNK

SEQ ID NO: 1013 - DNA, 1248 bp, Streptococcus pyogenes
atgttaaatagtgaaaaaatgattgcttccttggatcagcaagacctagcgcacgctgaaaaatatttccaaaaagctttaaaagaagatgatgcagatagtttaatcgccttaggagaatacttagaaagtataggttttttgccacatgccaagcgtatttatttgcagttagctgatgattacccagaactcaatataaatttagctcagattgcagcagaagacgacgccattgaagaagctttcttgtatttggataaggtttcaaaagatagccccaattatttgtcagctctcttagtaatggctgacctctatgacatggaaggactgacagaggtggcgcgtgaaaaattgcttcaagcagtgggcatcagcccagagccattggtcatttttggtttggcagaaattgacatgtccttgcagcattttaaagaagctattgattactatgcacagttagacaatcgtcaaatccttgaattgacaggtatttccacttatcaacgcattggacgagcctatgctagcttagggaaatttgaggcagccatcgaattcttggaaaaggccgtggccattgaatacgaagatgaaactgtttttgaattggcgaccctcatgtatgaccaagaaaattatcaaaaagccaatctttactttaaacagttggaaaccatcaatccagattatccaggttatgaatatggttatgctttgagtcttcatgaagagcataagacgtcagaagctttgcgcttggttcaacagggcctacgtaaaaatgcatttgacagtcaattattattactagcatcgcagctttcttatgaattacacgataggcagaatgctgaaaattacctgcttcaagcaaaggaagtagctgttgatgacgaagagattctcatgcgtttagtgaccctttattttgatgccgagcgttttgaggaggttattgctcttaatcgtgagacgattgataatgtcttaaccaaatggaccattgcaaaggcttaccacgccttggaacaagaagaagttgccttggctctttataatgagatttcggctgatttggcagaaaatccagagtttttacaggattatgcctatttattaagggagtttggccagtttcacaaggctatccaaatggctaccgcttacctcagacaagtgcctgatgatgtgaatatgcaagactttcttgaccatatcaagcaccaacaatcagaataa

SEQ ID NO: 1014 - protein, 415 aa, Streptococcus pyogenes
MLNSEKMIASLDQQDLAHAEKYFQKALKEDDADSLIALGEYLESIGFLPHAKRIYLQLADDYPELNINLAQIAAEDDAIEEAFLYLDKVSKDSPNYLSALLVMADLYDMEGLTEVAREKLLQAVGISPEPLVIFGLAEIDMSLQHFKEAIDYYAQLDNRQILELTGISTYQRIGRAYASLGKFEAAIEFLEKAVAIEYEDETVFELATLMYDQENYQKANLYFKQLETINPDYPGYEYGYALSLHEEHKTSEALRLVQQGLRKNAFDSQLLLLASQLSYELHDRQNAENYLLQAKEVAVDDEEILMRLVTLYFDAERFEEVIALNRETIDNVLTKWTIAKAYHALEQEEVALALYNEISADLAENPEFLQDYAYLLREFGQFHKAIQMATAYLRQVPDDVNMQDFLDHIKHQQSE

SEQ ID NO: 1015 - DNA, 1653 bp, Streptococcus pyogenes
atgtcttttgacggctttttcttacaccatttaaccaacgaattaaaagagaacttgctttacggtcgtatccaaaaggtcaatcaaccctttgaacgggaacttgtcttaaccattcgtaaccatcgcaagaattataaattgctattgtctgcccatcctgtttttggaagggtacaaatcacccaagcagactttcaaaatcctcaggtacctaatacctttaccatgattatgcgtaaatacctccagggtgcagtcattgagcagttagaacagattgataatgaccgcattatcgaaatcaaggtatctaataaaaatgaaatcggagatgctattcaggcaaccctaatcattgaaatcatggggaagcacagtaatatcatcttggtggaccgtgcagaaaataaaatcatcgaatccattaaacatgttggtttttcacaaaactcttaccgcaccattttacctggctctacctacattgagcctcctaaaacagctgctgttaatccttttacaattacagatgtgcctctatttgaaatcctccaaacacaagaactaacagttaaaagcttgcaacagcattttcaaggtttggggcgagacaccgcaaaagagttggccgagcttctgaccacagacaaattaaaacggttccgtgagttttttgctagacctactcaggcaaatctgaccacagcttcttttgcgcctgttcttttctcagatagtcatgcgacgtttgagactttgtctgacatgcttgaccacttttatcaagacaaggctgagcgtgaccgtatcaatcagcaagccagtgatttgatccaccgtgtgcaaactgaactggacaaaaatcgcaacaagctaagtaagcaagaagctgagctgctagccactgaaaatgctgagttgttccgtcaaaaaggagaattattgaccacctacctcagtctggtcccaaacaaccaagactctgtgattttagacaattattatacaggggaaaaaattgagattgccttagacaaggctctgacaccaaatcaaaatgctcaacgttattttaaaaaataccaaaagctaaaagaagctgtcaaacacttatctggattgattgccgataccaagcaaagtattacttactttgagagcgtagactacaatttatctcaagcaagtatcgacgacatcgaagatattcgcgaagaattatatcaggctggctttttgaaaagtcgccaaagagacaaacgccataaacgtaaaaagcctgagcagtacctggcttcagatggaacaaccattctcatggtgggacgcaataacttgcaaaatgaagaactcacctttaaaatggctaaaaaaggagaactctggttccatgctaaggatatccctggaagtcatgtcatcatcaaagacaatcttgacccaagtgacgaggttaaaactgatgctgccgaactagctgcttattattcgaaagctaggttatcaaatctcgttcaggtcgatatgattgaagctaaaaaattacacaaacctagtggcgccaagccaggatttgtgacttatactggtcaaaaaactttacgggttactcctgaccaagccaaaattctctctatgaaattatcctga

SEQ ID NO: 1016 - protein, 550 aa, Streptococcus pyogenes
MSFDGFFLHHLTNELKENLLYGRIQKVNQPFERELVLTIRNHRKNYKLLLSAHPVFGRVQITQADFQNPQVPNTFTMIMRKYLQGAVIEQLEQIDNDRIIEIKVSNKNEIGDAIQATLIIEIMGKHSNIILVDRAENKIIESIKHVGFSQNSYRTILPGSTYIEPPKTAAVNPFTITDVPLFEILQTQELTVKSLQQHFQGLGRDTAKELAELLTTDKLKRFREFFARPTQANLTTASFAPVLFSDSHATFETLSDMLDHFYQDKAERDRINQQASDLIHRVQTELDKNRNKLSKQEAELLATENAELFRQKGELLTTYLSLVPNNQDSVILDNYYTGEKIEIALDKALTPNQNAQRYFKKYQKLKEAVKHLSGLIADTKQSITYFESVDYNLSQASIDDIEDIREELYQAGFLKSRQRDKRHKRKKPEQYLASDGTTILMVGRNNLQNEELTFKMAKKGELWFHAKDIPGSHVIIKDNLDPSDEVKTDAAELAAYYSKARLSNLVQVDMIEAKKLHKPSGAKPGFVTYTGQKTLRVTPDQAKILSMKLS

SEQ ID NO: 1017 - DNA, 165 bp, Streptococcus pyogenes
atgacatgtgatataaaaggtcaagaaaaaaccataaaaaacaccctcactgagatgaatttggatgccaagttagacaatcgttttgaggatgtaacggttatttttatcatttttagttttaaaatgctctattttagacacgtaaaaaatcttgccttttga

SEQ ID NO: 1018 - protein, 54 aa, Streptococcus pyogenes
MTCDIKGQEKTIKNTLTEMNLDAKLDNRFEDVTVIFIIFSFKMLYFRHVKNLAF

SEQ ID NO: 1019 - DNA, 870 bp, Streptococcus pyogenes
atgattatttcatcagtttcacaaggccttatatggggagttttaggattaggaatctacctgacctttaggattttaaacttccctgacatgactacagaaggttcttttcctttaggaggagctgttgcggtcaccgctattagcttagggtggaatccatttctatcaaccttacttggtatgttatcaggtgctttagcaggttttttaacagggctgttatatacgaaaggaaaaatgccaacacttttagcgggaattttggtgatgacgtcatgtaactccattatgctaatggtaatgggaagagcaaacttgggtttacatgatcataaacgtattcaggattgtttacctttttcaattgatttaaatagccttttaacaggtctgataactgttgtgattgttattagcgttttgatctatttcctttacactaatctaggtcaagcttatatcgctacgggagacaataaagatatggctaagagttttggtattaacacggattggatggaagttatgggacttgtggtttctaatagtttaatagctttatcaggtgctctagtgagccaacaagatggctatgcagatgtctcaaaagggattggagttattgttattggtttggcgagcataattgttggtgaagtactatactcaactggactgactcttttagaacgtttgattgctattgtaataggctcgattctttatcaatttttaatttcagtagttattacgctaggttttaatacaagttatttgaaattaattagtgctcttgttttagcactgtgcctcatgataccagtggtaaaagagcgcttctttaagggagtgaggttaacacgatga

SEQ ID NO: 1020 - protein, 289 aa, Streptococcus pyogenes
MIISSVSQGLIWGVLGLGIYLTFRILNFPDMTTEGSFPLGGAVAVTAISLGWNPFLSTLLGMLSGALAGFLTGLLYTKGKMPTLLAGILVMTSCNSIMLMVMGRANLGLHDHKRIQDCLPFSIDLNSLLTGLITVVIVISVLIYFLYTNLGQAYIATGDNKDMAKSFGINTDWMEVMGLVVSNSLIALSGALVSQQDGYADVSKGIGVIVIGLASIIVGEVLYSTGLTLLERLIAIVIGSILYQFLISVVITLGFNTSYLKLISALVLALCLMIPVVKERFFKGVRLTR

SEQ ID NO: 1021 - DNA, 969 bp, Streptococcus pyogenes
atggtaacagtttctaaagaacaacatttagatatgttccttaaaatggaacgtattcgtgaatttgattcacgtattaataaactcgtccgtcgtggatttgtacaagggatgactcacttctcagttggtgaagaagcagccaatgttggagcggtggctcacttgtcttacgatgacattattttttcaaatcaccgtggacatggacaatcaatcgctaaagacatggaccttaataaaatgatggctgagcttgctggtaaagcaactggtgtgtctaaagggcgtggtggctcaatgcacttggctgattttgaaaaaggaaactatggtactaatggtatcgttggtggtggttacgctcttgcagttggtgctgccctcactcaacaatacaaaggaactaacaatatagctgttgctttctcaggtgatggcgctactaacgaaggatcattccacgagtctgttaatatggctgcaacatggaaacttcctgttattttcttcatcatcaacaaccgttatggaatttcaatgagcatcaataatgcaacaaatacaccacacttatacacacgtgcagaagcttacggagttcctggtttctactgtgaagatggcaatgacgtgatggctgtctatgaaacaatgggcaaagccgttgaacatgttcgtggtggaaatggtccagctattgttgaggtagaatcataccgttggtttggtcactcgactgcagatgctggtaaataccgtactaaagaagaagtggatgagtggaaagaaaaagatccaatgatcaaatatcgtacttatctgacaagcgaaggcattgccactgatgacgaattggatgctattcaagcacaagtcaaaaaagaagttgacgatgcttatgaatttgcacaaaacagtccagatccagaactttcagtagccttcgaagacgtttgggttgactaa

SEQ ID NO: 1022 - protein, 322 aa, Streptococcus pyogenes
MVTVSKEQHLDMFLKMERIREFDSRINKLVRRGFVQGMTHFSVGEEAANVGAVAHLSYDDIIFSNHRGHGQSIAKDMDLNKMMAELAGKATGVSKGRGGSMHLADFEKGNYGTNGIVGGGYALAVGAALTQQYKGTNNIAVAFSGDGATNEGSFHESVNMAATWKLPVIFFIINNRYGISMSINNATNTPHLYTRAEAYGVPGFYCEDGNDVMAVYETMGKAVEHVRGGNGPAIVEVESYRWFGHSTADAGKYRTKEEVDEWKEKDPMIKYRTYLTSEGIATDDELDAIQAQVKKEVDDAYEFAQNSPDPELSVAFEDVWVD

SEQ ID NO: 1023 - DNA, 1338 bp, Streptococcus pyogenes
atgaagacattactcggcattattgctggcaaagctgctcaatccattttaacaaaactagggcgaggatctacttatcctggtcgattggctctagcttgtgataaagatattttaaaggatttgtctaaagactatgatattgtggtcgtcactggtactaatggtaaaacgttaacaactgctcttactgtcggtattttgaaagaggcatttggcgagataatcacaaatccaagtggtgccaatatgattactggaattacttctacttttttagctgctaaaaaagggaaatctgaaaggcaaattgctgttttagaaattgacgaggctagtcttcctagaattaccacttacttaaaacctagtctttttgtttatactaatatttttagggatcagatggaccgctacggagagatttacactacttatcagatgattgtagatggtgctcgaaatgctccaaaagcaactattctagccaatggagatagtcctattttctcttctaaggacatagttaatccagttcagtattatggttttgatactgctaagcatgctccgcagctagctcattacaacacagaagggattttatgtccaaaatgcgaacatattcttcagtatcgtctcaatacttatgcgaatctaggagactttgtttgcttaaactgtcagttccaaagaccaacgttagattatcaattaactgagctcaccgctattactcaccaaagttctgaatttgttattgatggacaaaactacaagataaatgttggtggtctttataatatttacaatgcgctcgctgccgtctctgttgctgaatttttcggtgtttctcccgagaaaatcaaggcgggctttaacaaaagtaaggcggtttttggaagacaagaaacttttactgttggtgataaatcatgcacccttatccttatcaagaatcctgttggagccagtcaggcactggaaatgattcaattggcagattatccatttagcttatcagttttattaaatgccaattacgctgatggcattgataccagctggatttgggatgctaattttgaactcattacccaaatgcccattacagaaattaatgctggcggcgtccgccactctgaaattgctagaagacttagagtcacaggatttgacgatactaagataaaacaagctgaaaagctcgagcaaatcatagaaaccattgaaaaacaagaagctaagcatgcctatattttagcaacctatacggcaatgttagaattccgtagcttacttgctgaccgccatgtcgttgaaaaggagatgatctaa

SEQ ID NO: 1024 - protein, 445 aa, Streptococcus pyogenes
MKTLLGIIAGKAAQSILTKLGRGSTYPGRLALACDKDILKDLSKDYDIVVVTGTNGKTLTTALTVGILKEAFGEIITNPSGANMITGITSTFLAAKKGKSERQIAVLEIDEASLPRITTYLKPSLFVYTNIFRDQMDRYGEIYTTYQMIVDGARNAPKATILANGDSPIFSSKDIVNPVQYYGFDTAKHAPQLAHYNTEGILCPKCEHILQYRLNTYANLGDFVCLNCQFQRPTLDYQLTELTAITHQSSEFVIDGQNYKINVGGLYNIYNALAAVSVAEFFGVSPEKIKAGFNKSKAVFGRQETFTVGDKSCTLILIKNPVGASQALEMIQLADYPFSLSVLLNANYADGIDTSWIWDANFELITQMPITEINAGGVRHSEIARRLRVTGFDDTKIKQAEKLEQIIETIEKQEAKHAYILATYTAMLEFRSLLADRHVVEKEMI

SEQ ID NO: 1025 - DNA, 1131 bp, Streptococcus pyogenes
atgtcaaaaaaacctacttcagcctatgtgcacattcctttttgcacacaaatttgttattattgcgatttttcaaaagtctttatccaaaatcaacctgttgatgcttatttgaaagccttgattcaagaatttgactcttatggcattcgagacctaaaaaccctttatattggaggaggtacgcctacagctatcactgctaaacagttggagtatctcctaaatcaccttgaacgaaacctcaatttagatgatcttgaagaattcacaattgaggcaaatcctggtgatttgacgccagaaaaaattgcggtgcttcagaggtcagctgtcaatcggatttccttgggggtgcagacttttaataacaagcaattaaagcagattggccgtagccataatgaagaacaaatttatagcaccattgccaatttaaaaactgcaggctttcacaatatttccattgatttaatttatgccttgccaggtcaaaccttagatcaagtcaaggaaaatgttgctaaagctttggcacttgatattccccaccttagtctttatagccttattttggaacatcacactgtttttatgaacaaaatgcgacgtggtaaacttaacttaccaacggaagacttggaagcggaaatgtttgagtacattatttcagaaatggaagctaatggttttgagcattatgaaatttccaattttaccaaaccaggttttgaaagtcgccataacttgatgtattgggataatgtggagtattttggatgtggtgcaggggcttcaggttaccttaatggcattcgttatcagaatcgggtgcccatccagcattatcttaaagcggttgaagcagggaatgctagactaaatgaagaagtgctgcgcaaagaggaaatgatggaagaggaactctttttgggcttacgtaaaaagacaggagtctccatccagcggttccaagaaaaatttggtatgtcttttgaggagcgttatggaaatattgttagggagcttcaaaaccaaggactgcttgtcaaagatgacgcctttgtcagaatgactaaaaagggtcttttcttaggtgattctgttgctgagcggtttatattagattag

SEQ ID NO: 1026 - protein, 376 aa, Streptococcus pyogenes
MSKKPTSAYVHIPFCTQICYYCDFSKVFIQNQPVDAYLKALIQEFDSYGIRDLKTLYIGGGTPTAITAKQLEYLLNHLERNLNLDDLEEFTIEANPGDLTPEKIAVLQRSAVNRISLGVQTFNNKQLKQIGRSHNEEQIYSTIANLKTAGFHNISIDLIYALPGQTLDQVKENVAKALALDIPHLSLYSLILEHHTVFMNKMRRGKLNLPTEDLEAEMFEYIISEMEANGFEHYEISNFTKPGFESRHNLMYWDNVEYFGCGAGASGYLNGIRYQNRVPIQHYLKAVEAGNARLNEEVLRKEEMMEEELFLGLRKKTGVSIQRFQEKFGMSFEERYGNIVRELQNQGLLVKDDAFVRMTKKGLFLGDSVAERFILD

SEQ ID NO: 1027 - DNA, 663 bp, Streptococcus pyogenes
atgaatcttaatttttccttactagatgaaccgattccattaagaggcggtacaattcttgtgctcgaagatgtctgtgtattttcaaaaatagtgcaatattgttaccaatatgaggaagattctgaacttaaattttttgatcacaagatgaaaacaatcaaagaatcagaaatcatgcttgtaacagatattttaggatttgatgttaactcctcaaccattttaaaattgattcatgcagatttagaatctcaatttaatgagaaacccgaagtgaaatcgatgattgacaaattggttgctacgattacagaactgattgtctttgaatgcttagaaaatgaattagatttagagtatgatgaaatcacaatcctggaattgattaagtccttaggagtaaaagtagaaacgcaaagtgatactatttttgaaaaatgtctagagatacttcaaattttcaaatatctcactaagaaaaagttgcttatttttgtcaatagcggagcttttctaacaaaggatgaagtggctagtttacaagagtatatatcattgacaaatttaacagttctctttttagaaccacgtgaactatatgattttccgcagtatattttagatgaagattatttcttaataactaaaaatatggtataa

SEQ ID NO: 1028 - protein, 220 aa, Streptococcus pyogenes
MNLNFSLLDEPIPLRGGTILVLEDVCVFSKIVQYCYQYEEDSELKFFDHKMKTIKESEIMLVTDILGFDVNSSTILKLIHADLESQFNEKPEVKSMIDKLVATITELIVFECLENELDLEYDEITILELIKSLGVKVETQSDTIFEKCLEILQIFKYLTKKKLLIFVNSGAFLTKDEVASLQEYISLTNLTVLFLEPRELYDFPQYILDEDYFLITKNMV

SEQ ID NO: 1029 - DNA, 792 bp, Streptococcus pyogenes
atggcagctttagctgtattgatttgttttgggggaaattatttaaccggtcaaagcatgatggaaagacccctagtagttggactggtcacaggtcttcttttaggagatatgaaggtcggtatcttaatgggggcctctctagaagctcttttcctaggaaatgtgaatattgggggtgttattgcagctgagcctgtaacagcgactgccatggcaacaacctttaccattatttcacatattgaccaaaaagcagccatgaccctagctgttccaattggaatgttggcagcctttgtggttatgtttttgaaaaacgtcttcatgaatatctttgctccaatggttgataaagctgcagcagctaaccatcaaggtaaactagtgatgctccactatggcacttggattatctattacttaatcattgcctctatttctttcattggtatcttagtaggtagtggacctgttaatgcctttgtggaacacattcctcaaaatctcatgaatggcttgagtgctgcgggaggccttcttccagctgtcggttttgccatgctgatgaaattattgtggaccaacaaattagctgttttttacctattgggctttgtcttaacagcttatttgaaattaccagcggttgcagttgctgccctaggagcagttatttgcgtcattagttcccaacgtgatctagaattagacgcaattactagaggtgcaattagtaaacaaacaacctttgactctaaagaatcagaagaggaggacttcttcgcatga

SEQ ID NO: 1030 - protein, 263 aa, Streptococcus pyogenes
MAALAVLICFGGNYLTGQSMMERPLVVGLVTGLLLGDMKVGILMGASLEALFLGNVNIGGVIAAEPVTATAMATTFTIISHIDQKAAMTLAVPIGMLAAFVVMFLKNVFMNIFAPMVDKAAAANHQGKLVMLHYGTWIIYYLIIASISFIGILVGSGPVNAFVEHIPQNLMNGLSAAGGLLPAVGFAMLMKLLWTNKLAVFYLLGFVLTAYLKLPAVAVAALGAVICVISSQRDLELDAITRGAISKQTTFDSKESEEEDFFA

SEQ ID NO: 1031 - DNA, 972 bp, Streptococcus pyogenes
atgtatatattctcatcgtcaaaaaaagatagtgctaaagaattagttatcttgactcctaatagccaaactattttaacagggactattccagcctttgaggaaaagtatggggttaaagtaagattaatccaaggtgggacgggccaacttattgatcaattaggtcgaaaagataaaccattaaacgctgatattttctttggtggcaattacactcaatttgaaagccataaagatttatttgaatcttatgtttctccgcaggtttctactgtcatttcagattaccaattgcctagtcatcgcgcaaccccatatacgatcaatggcagtgtactgattgttaataacgaattagcaagaggacttcatattaccagttatgaggatttgctacaaccagctttaaaaggcaaaattgcttttgctgatcccaacagttcatcaagtgccttctcacagctgactaatatattgttagctaagggggggtacacaaacgctgacgcttgggcttacatgaagcgcttgttggtcaatatgaattctattagggctacgagttcttcagaagtctatcaatctgtcgctgagggtaagatgattgttgggctaacctacgaagatccttgtatcaacctgcaaaaaagtggtgccaatgtttccattgtttatccaaaagaaggaacggtgtttgtgccctcctctgttgctattatcaaacatgcgccaaacatgacagaggctaagctctttattaattttatgttatcacgtgatgtgcaaaatgcctttggccaatcaaccagtaaccgacccattcgtcaagatgcccaaaccagtcacgacatgaaagccttagaaacgatagctactttgaaagaggattatgcttatgttaccaagcacaagaaaaaaatagtggctacgtacaaccagttgcgccaacggttggaaaaagctaagtag

SEQ ID NO: 1032 - protein, 323 aa, Streptococcus pyogenes
MYIFSSSKKDSAKELVILTPNSQTILTGTIPAFEEKYGVKVRLIQGGTGQLIDQLGRKDKPLNADIFFGGNYTQFESHKDLFESYVSPQVSTVISDYQLPSHRATPYTINGSVLIVNNELARGLHITSYEDLLQPALKGKIAFADPNSSSSAFSQLTNILLAKGGYTNADAWAYMKRLLVNMNSIRATSSSEVYQSVAEGKMIVGLTYEDPCINLQKSGANVSIVYPKEGTVFVPSSVAIIKHAPNMTEAKLFINFMLSRDVQNAFGQSTSNRPIRQDAQTSHDMKALETIATLKEDYAYVTKHKKKIVATYNQLRQRLEKAK

SEQ ID NO: 1033 - DNA, 1398 bp, Streptococcus pyogenes
atggcttatcaaactatttacccttatacaaatgaagtccttcatacatttgataatatgaccgatcaaggtttggcagatgtccttgaaagagctcaccttctctataaaaaatggcgcaaggaagatcatttagaagaacgtaaagcccagcttcatcaagtggctaatattcttcgtcgtgaccgcgataaatacgctgaaatcatgaccaaagacatgggaaaactgttcacagaagcccaaggtgaagtaaatctttgtgccgatattgctgattactacgctgataaggcagatgaatttttgatgtctacgccactagaaacggattcaggtcaagcttactatttgaaacaatcaactggtgttatcctagctgttgagccttggaattttccttactatcaaatcatgcgggtctttgcgccaaactttattgttggaaacccaatggttttaaaacacgcgtccatttgcccacgctctgcccaatctttcgaagaattagttcttgaagctggtgctgaagcaggtagtattaccaatttgtttatttcttatgaccaagtatcacaagtgattgctgataaacgtgtggttggtgtctgcttgacaggttccgaacgtggaggagctagcattgcagaagaagctggtaaaaacttgaaaaaaacaacccttgaattgggtggagatgatgcctttattatccttgatgacgcggattgggatcaattagagaaggtgctttacttctctcgtctctacaatgcaggtcaagtatgtacctcatcgaaacgttttatcgtgcttgacaaagactatgaccgtttcaaagagttattaacaaaagtcttcaaaacagctaaatggggtgacccaatggatcccgaaacgacgttggcgccattatcatcagctcaagctaaagcagatgttcttgaccaaattaagttggccttggatcatggtgcggagttggtttatggtggtgaagcgattgatcatccaggtcattttgtcatgccaaccattattgctggcctcacaaaagacaaccctatttactatcaagaaatctttggcccagtcggtgaaatctacaaagtgtcttctgaagaagaagcgattgaagtggcgaatgattctaactatggccttggaggtactatctttagtagcaatcaagaacatgcgaaagccgtagctgctaaaattgaaactggtatgtcttttatcaactcaggctggacaagtcttccggaactcccatttggtgggattaaacattcaggctatggtcgtgaattgagtgagcttggctttacatcttttgtgaatgaacaccttatctatattccgaataaaacgaataatggcaatactaaagtttga

SEQ ID NO: 1034 - protein, 465 aa, Streptococcus pyogenes
MAYQTIYPYTNEVLHTFDNMTDQGLADVLERAHLLYKKWRKEDHLEERKAQLHQVANILRRDRDKYAEIMTKDMGKLFTEAQGEVNLCADIADYYADKADEFLMSTPLETDSGQAYYLKQSTGVILAVEPWNFPYYQIMRVFAPNFIVGNPMVLKHASICPRSAQSFEELVLEAGAEAGSITNLFISYDQVSQVIADKRVVGVCLTGSERGGASIAEEAGKNLKKTTLELGGDDAFIILDDADWDQLEKVLYFSRLYNAGQVCTSSKRFIVLDKDYDRFKELLTKVFKTAKWGDPMDPETTLAPLSSAQAKADVLDQIKLALDHGAELVYGGEAIDHPGHFVMPTIIAGLTKDNPIYYQEIFGPVGEIYKVSSEEEAIEVANDSNYGLGGTIFSSNQEHAKAVAAKIETGMSFINSGWTSLPELPFGGIKHSGYGRELSELGFTSFVNEHLIYIPNKTNNGNTKV

SEQ ID NO: 1035 - DNA, 1410 bp, Streptococcus pyogenes
atgacaaccattgattttaaagcagaagttgacaaacgtaaaaaagctatgctagcagatttagttgacctattacgcattaattcagaacgcgatgaccaattagctgatgataaacacccatttggcccaggtccagttaaggccttggagcatttcctcgcaatggctgagcgtgatggctacaaaacgcgtaatattgataactatgcaggtgactttgaatttggtcaaggtgatgaagtactaggaatctttggtcaccttgatgttgtgccagctggtagcggttgggatacagacccttatgagccagtgattaaagacgatcgcatctatgcgcgtgggtcttcggatgataaaggaccaaccatggcgtgttactacgctctgaaaatcattaaagaactgggtcttcctgtgtctaaaaaagttcgtttcattgttggtaccgatgaagaatctggctggggggatatggattattactttgctcataatggcttgaaaaatccagattttggtttctcaccagatgctgaatttccaattatcaatggtgagaaaggaaatatcactgaatacctccatttcgctggtgacaacaagggcgcttttgtgcttcatcgcttccaaggtgggttgcgtgaaaacatggtaccagaatctgccacagctgtcattacggcaccgcatgaccttgatgtgctagaagcagctttggagcaatttttatcagaacatggtgttaaaggttctatgaaggctactgatggtaaaattgaagtaactattattggtaagtctgctcacgggtcgactccagaagcgggtgttaatggtgctaccttgttggctaaattcctgaatcaatttacctttgaaggggctgctaaggattatttacatgtggcaggtgaggtgcttcatgaagactttgcggcagaaaaactaggccttgcttatactgatgaccgtatgggagccctgagcatgaacgcaggtgtcttcacctttgatagtcaatcagctgacaataccatcgccttgaatttccgctatcccaaaggaactgatgcggcaaccttaaaagcaggattggaaaaattaccaggattaactaaggtaagcctttctgagcatgaacatacacctcattatgtgccaatggatgatgaattagtagctaccttacttgctgtttacgaaaaacaaacaggtcttaaaggctacgaacaagttatcggcggaggaacctttgggcgcttgctagaacgtggtgtggcctttggagcgatgttcccaggtgatgaaaacactatgcaccaagctaatgagtatatgcctttagaaaatatttatcgctcagcagctatttatgctgaagcaatctacgaattaattaaataa

SEQ ID NO: 1036 - protein, 469 aa, Streptococcus pyogenes
MTTIDFKAEVDKRKKAMLADLVDLLRINSERDDQLADDKHPFGPGPVKALEHFLAMAERDGYKTRNIDNYAGDFEFGQGDEVLGIFGHLDVVPAGSGWDTDPYEPVIKDDRIYARGSSDDKGPTMACYYALKIIKELGLPVSKKVRFIVGTDEESGWGDMDYYFAHNGLKNPDFGFSPDAEFPIINGEKGNITEYLHFAGDNKGAFVLHRFQGGLRENMVPESATAVITAPHDLDVLEAALEQFLSEHGVKGSMKATDGKIEVTIIGKSAHGSTPEAGVNGATLLAKFLNQFTFEGAAKDYLHVAGEVLHEDFAAEKLGLAYTDDRMGALSMNAGVFTFDSQSADNTIALNFRYPKGTDAATLKAGLEKLPGLTKVSLSEHEHTPHYVPMDDELVATLLAVYEKQTGLKGYEQVIGGGTFGRLLERGVAFGAMFPGDENTMHQANEYMPLENIYRSAAIYAEAIYELIK

SEQ ID NO: 1037 - DNA, 501 bp, Streptococcus pyogenes
atgagtgaagcaattattgctaaaaaagctgaacaagtcgaacttattgctgagaaaatgaaagcagcagcaagtatcgttattgttgattcacgtggtcttacagttgatcaagatactgttcttcgtcgttcacttcgtgaaagtggcgttgagttcaaagttatcaaaaactcaattttgactcgtgcagctgaaaaagcaggtcttgatgagttgaaagatgtattcgtaggaccatctgcagtagcattttctaacgaagatgttatcgcaccagctaaagttatcaacgactttactaaaactgctgacgcacttgaaatcaaaggtggtgcaatcgaaggcgctgtttcttcaaaagaagaaatccaagcacttgcaacattgccaaaccgcgaaggaatgctttctatgcttctttctgtacttcaagctccagtccgtaacgttgcatacgctgtcaaagctgttgcagaaaacaaagaaggcgctgcttaa

SEQ ID NO: 1038 - protein, 166 aa, Streptococcus pyogenes
MSEAIIAKKAEQVELIAEKMKAAASIVIVDSRGLTVDQDTVLRRSLRESGVEFKVIKNSILTRAAEKAGLDELKDVFVGPSAVAFSNEDVIAPAKVINDFTKTADALEIKGGAIEGAVSSKEEIQALATLPNREGMLSMLLSVLQAPVRNVAYAVKAVAENKEGAA

SEQ ID NO: 1039 - DNA, 366 bp, Streptococcus pyogenes
atggcattgaacattgaaaacattattgctgaaattaaagaagcttcaatccttgagcttaacgatcttgtaaaagctatcgaagaagaatttggtgtaactgcagctgctcctgtagctgctgcagctgctggtggtgctgaagaagctgctaaagattcattcgacgttgaattgacatctgctggcgacaaaaaagttggcgttatcaaagctgttcgtgaaatcacaggtcttggtcttaaagaagctaaaggtcttgttgatggagcacctgctaacgttaaagaaggcgttgctgctgcagaagctgaagaaatcaaagctaaacttgaagaagctggagcaacaatcactcttaaataa

SEQ ID NO: 1040 - protein, 121 aa, Streptococcus pyogenes
MALNIENIIAEIKEASILELNDLVKAIEEEFGVTAAAPVAAAAAGGAEEAAKDSFDVELTSAGDKKVGVIKAVREITGLGLKEAKGLVDGAPANVKEGVAAAEAEEIKAKLEEAGATITLK

SEQ ID NO: 1041 - DNA, 324 bp, Streptococcus pyogenes
atgaagtttttagatttgtttgcaggaattggaggctttcgattgggtttaattaatcagtgccatgagtgtattggcttttgtgagattgataagtttgcgaggcaatcttacaaagccatctatgagaccgaaggagaaatagaatttcatgacattagacaagtcacagaccaagactttagacaacttagagggcaagtggatatcatctgcggtggtttttcccttgtcaagcattttcactcgcaggcagacgactgggatttgagggcactaggagaactctcttctttgagattactcgagcgaccaaacagataa

SEQ ID NO: 1042 - protein, 107 aa, Streptococcus pyogenes
MKFLDLFAGIGGFRLGLINQCHECIGFCEIDKFARQSYKAIYETEGEIEFHDIRQVTDQDFRQLRGQVDIICGGFSLVKHFHSQADDWDLRALGELSSLRLLERPNR

SEQ ID NO: 1043 - DNA, 690 bp, Streptococcus pyogenes
atgttgaaaatacaaaatctaaaaaaatcttatggtaagagaaccatattgaataatgtcaatatgaatattcctaagggaaaagtgtatgctttaatcggtccaaatggtgctggaaaatcaactattatgaaaattttgacaggcttagttagtaagacaagtggttctattatttttgaaggtagagaatggtcacgtcgggatctgcgaaaaatcgggagtattattgaagaaccaccactttataaaaatttgagtgcttacgataatatgaaggtagttacaacaatgcttggtgtttcagaaagcactatacttccattattaaataaagttggtctaggaaatattgacaagagaccagtaaaacaattttctcttggaatgaagcaacggttaggtatagctatctctttaataaattcacctaaactacttatattagacgaacctactaatggcttggacccaattggaattcaagaattaagggaaattatagagtcatttaaatcagaaggaatgacaattatgatttcaagccatatactgtcagaagttgaacatctagctgattttattggatttatctatgaaggaaagattattctggaaaaagaatatgacggctctgagaatcttgaagagttattcaataatcaaattttatttgaaaagaggaggtag

SEQ ID NO: 1044 - protein, 229 aa, Streptococcus pyogenes
MLKIQNLKKSYGKRTILNNVNMNIPKGKVYALIGPNGAGKSTIMKILTGLVSKTSGSIIFEGREWSRRDLRKIGSIIEEPPLYKNLSAYDNMKVVTTMLGVSESTILPLLNKVGLGNIDKRPVKQFSLGMKQRLGIAISLINSPKLLILDEPTNGLDPIGIQELREIIESFKSEGMTIMISSHILSEVEHLADFIGFIYEGKIILEKEYDGSENLEELFNNQILFEKRR

SEQ ID NO: 1045 - DNA, 1278 bp, Streptococcus pyogenes
atgacttatgaagagactctagaatggattcatgatcacttagttttcggcatcaagccaggcttaaaacgtatgctttgggttcttggacagttaggaaatccccaaaaaaatgtcaagggagtgcatatcgttggaactaacggaaaaggttccacggtcaatcatttacaacacatctttacgacagctggttatgaagtggggacctttacctctccttatattatggatttcaaagaacgtattagcataaatggtcgaatgatttcagaaaaagatttggttattgctgctaatcgtattcgtcctttgacagagcgtctagttcaagagactgattttggagaggtaactgaatttgaagtgattactttgatcatgttcctctattttggtgacatgcatcctgtagatattgctattattgaagcaggccttggcggtctttatgattcgaccaatgtttttcaagcaatggttgtggtctgtccctcaattggtttagatcaccaagctattttgggcgagacttacgctaatattgccgcccaaaaagctggtgttttagaagggggcgagacccttgtttttgccgttgaaaacccgtcagctcgagaggtttttttaacaaaagctgagcaggttggtgcttcaatctgggaatggcaagagcagtttcaaatggctgagaacgcatctggctatcgttttactagtcctttaggagttatttcagatattcacatcgctatgccaggacaccaccaagtgtctaatgcagctttagctattatgacttgcttaaccttgcaagaccgctatcctaggctaactccagatcatataagggaaggtctagcaaatagtttgtggctaggccgtaccgaattattagcaccaaatctaatgattgatggggctcataacaatgaaagcgttgctgctttggtagccgtcttaaaaaataactacaatgataaaaagcttcatattttgtttggtgcgatcgacaccaagcctattgcagatatgttggttgctcttgagcaaataggtgacttgcaggttactagctttcattaccctaacgcctatccattggaaaaatacccagaacgttttggtagggttgctgatttcaaagatttcttggccttgcgtaagcatgctaaagcagatgactttttcgtgattacagggtcactatattttatttcagaaattagacagtattgggaaaaacatattgaaaaaagcgttcttttaacccattaa

SEQ ID NO: 1046 - protein, 425 aa, Streptococcus pyogenes
MTYEETLEWIHDHLVFGIKPGLKRMLWVLGQLGNPQKNVKGVHIVGTNGKGSTVNHLQHIFTTAGYEVGTFTSPYIMDFKERISINGRMISEKDLVIAANRIRPLTERLVQETDFGEVTEFEVITLIMFLYFGDMHPVDIAIIEAGLGGLYDSTNVFQAMVVVCPSIGLDHQAILGETYANIAAQKAGVLEGGETLVFAVENPSAREVFLTKAEQVGASIWEWQEQFQMAENASGYRFTSPLGVISDIHIAMPGHHQVSNAALAIMTCLTLQDRYPRLTPDHIREGLANSLWLGRTELLAPNLMIDGAHNNESVAALVAVLKNNYNDKKLHILFGAIDTKPIADMLVALEQIGDLQVTSFHYPNAYPLEKYPERFGRVADFKDFLALRKHAKADDFFVITGSLYFISEIRQYWEKHIEKSVLLTH

SEQ ID NO: 1047 - DNA, 795 bp, Streptococcus pyogenes
atgaagaaaacctctagtcttttttcgattccttacttcttatggattctcttttttgttgtggcaccagtcactctcttgttttacaagtccttttttgacatagaagggcgcgtgaccttagccaattatgaaaccttttttagctcttggacttatttgaggatgagtgtgaattctattttatacgctggtattatcacactcgtcacgctcttgatttcatatcctacggctctctttttaacgcgcctaaagcacaagcagttgtggcttatgctcattatcttgccaacctgggtaaatttattgctaaaggcctatgcctttatgggaatctttggtcaacaaggagggattaacagctttttaacctttatggggattggcccgcagcaaatccttttcacagatttctccttcatttttgtagcctcttacattgagctcccttttatgatgttaccgatttttaacgctttggatgatattgaccataatgtcatcaatgccagtcgcgacctaggagctagtgaatttcaggccttctcaaaagttatttttcccctttctttaaatggggttagggcaggtgttcagtctgtctttatcccaagtttgagtctctttatgttaacccgtttgattggtggaaaccgggtgattacacttggtacagccattgaacaacattttttgaccacccaaaactggggaatgggatcaaccattggtgtcgtcttgattttgaccatggttgctattatgtggctcacaaaggagaaaagtaaatga

SEQ ID NO: 1048 - protein, 264 aa, Streptococcus pyogenes
MKKTSSLFSIPYFLWILFFVVAPVTLLFYKSFFDIEGRVTLANYETFFSSWTYLRMSVNSILYAGIITLVTLLISYPTALFLTRLKHKQLWLMLIILPTWVNLLLKAYAFMGIFGQQGGINSFLTFMGIGPQQILFTDFSFIFVASYIELPFMMLPIFNALDDIDHNVINASRDLGASEFQAFSKVIFPLSLNGVRAGVQSVFIPSLSLFMLTRLIGGNRVITLGTAIEQHFLTTQNWGMGSTIGVVLILTMVAIMWLTKEKSK

SEQ ID NO: 1049 - DNA, 1533 bp, Streptococcus pyogenes
atggaaaaccataaaaatgaattcaccttttccaacaaatcaattattgcctatgtttggcgtggtgttgtggttggtattattgctggtgttattgttagtttattccggttgttaattgaagtgacagctgactgggtgattgaatggtaccgatacgctcatatcaattcgctgttgctacttcctatactaagtgtcagtttgttagctgttctttttgtaggttttttagtaaagtctgattctgatataaaaggatcagggatcccccatgtcgaaggagaactaaaggggctaatgtccccagattggtggagtgtcctttggaaaaaatttttaggaggaatcatggctatttctatgggatttatgctcggtcgtgagggtccttcgattcagttaggtgctatgtcagccaaaggattagctaagtttttaaaatcgagtcgtttggaaaagcgagtgctaattgccagcggagcagcagcagggctatcagcagcttttaatgctccaatagcaggcctcttgtttgttgttgaagaaatttaccatcatttttcgcgtttaatttggattacagcgctagtggctagcttagtggctaattttatttctctgaatatttttggattgaaaccagtcttagcaatgtcagaggcgatgccttttttaggactcaatcaatattggttgttgcttttacttggattatttctaggctgcttaggctatttatatgagatagttatccttaattttaataaactttatgttattttagggagttggttacatctgccagattatttttacggtattattatggtttttctaattttaccgattggctattatttaccacagttacttggaggaggacatggtttaatactttctttatccaatcaacaattgcctttgatgactatcttcttttattttattattcgatttattgttagtatgtttagttatggaagtggcttacctggaggtatttttttacctattttaactttaggtgctttggcaggcctattatttgggcaaatagcttctcaattaggtttattgaaccaatcttttctttctctttttttgatattagggatggcagggtattttgcggcaatttcaaaagcaccactgacaggcatgattttggtaactgaaatggtaggtgatttgaaacccttaatggccatagctgtagttacttttgtctcctatttagtgatggatttgttaaatggacagccaatttacgaagctatgctagataagatggcaatgaagcatccaactaatcttgttgaaccaacattaattgaattgactgttggtgataagattgcagggaaatatgttaaagagttaaagcttccagaaaatgtcttaattacaacccaaattcaccatcaaaaatctcaagttgtgtcaggtaacacgcgccttttatcaggagcaactatctttttggtcgttaatgaagctgatacaggttttgtccgtgaggtattgatgtag

SEQ ID NO: 1050 - protein, 510 aa, Streptococcus pyogenes
MENHKNEFTFSNKSIIAYVWRGVVVGIIAGVIVSLFRLLIEVTADWVIEWYRYAHINSLLLLPILSVSLLAVLFVGFLVKSDSDIKGSGIPHVEGELKGLMSPDWWSVLWKKFLGGIMAISMGFMLGREGPSIQLGAMSAKGLAKFLKSSRLEKRVLIASGAAAGLSAAFNAPIAGLLFVVEEIYHHFSRLIWITALVASLVANFISLNIFGLKPVLAMSEAMPFLGLNQYWLLLLLGLFLGCLGYLYEIVILNFNKLYVILGSWLHLPDYFYGIIMVFLILPIGYYLPQLLGGGHGLILSLSNQQLPLMTIFFYFIIRFIVSMFSYGSGLPGGIFLPILTLGALAGLLFGQIASQLGLLNQSFLSLFLILGMAGYFAAISKAPLTGMILVTEMVGDLKPLMAIAVVTFVSYLVMDLLNGQPIYEAMLDKMAMKHPTNLVEPTLIELTVGDKIAGKYVKELKLPENVLITTQIHHQKSQVVSGNTRLLSGATIFLVVNEADTGFVREVLM

SEQ ID NO: 1051 - DNA, 837 bp, Streptococcus pyogenes
atgacacagatgaattatacaggtaaggtaaaacgagttgctattattgcaaatggtaagtaccaaagtaaacgcgtcgcctccaaacttttctccgtatttaaagatgatcctgatttctatctttcaaagaaaaatccggatattgtgatttctattggcggagatgggatgctcttatctgcctttcacatgtatgaaaaagaattagataaggtacgttttgtaggaatccacaccggtcatcttggcttttataccgattatagggattttgaagttgataaattaattgataatttaagaaaagacaagggagaacaaatctcttatccgattttaaaagttgctattactttagatgatggtcgtgtggttaaagcgcgtgctttgaatgaagcgacggttaagcgtattgaaaaaacgatggtagcagatgttattattaaccatgtcaaatttgaaagcttccgaggtgatgggatttcagtatcgaccccgacagggagcacagcctacaataaatctttaggtggtgctgtcttgcatccgacgattgaagcgctgcaattgacggaaatttccagtcttaataaccgtgtctttagaaccttgggctcatcaatcattattcccaaaaaagataagattgagttagtgccaaaacgattaggaatttataccatttccattgataataaaacctatcagttaaaaaatgtgacgaaggtggagtattttatcgacgatgagaaaattcattttgtttcctctccgagtcatacgagcttttgggaaagggtcaaggatgcctttattggagagattgactcatga

SEQ ID NO: 1052 - protein, 278 aa, Streptococcus pyogenes
MTQMNYTGKVKRVAIIANGKYQSKRVASKLFSVFKDDPDFYLSKKNPDIVISIGGDGMLLSAFHMYEKELDKVRFVGIHTGHLGFYTDYRDFEVDKLIDNLRKDKGEQISYPILKVAITLDDGRVVKARALNEATVKRIEKTMVADVIINHVKFESFRGDGISVSTPTGSTAYNKSLGGAVLHPTIEALQLTEISSLNNRVFRTLGSSIIIPKKDKIELVPKRLGIYTISIDNKTYQLKNVTKVEYFIDDEKIHFVSSPSHTSFWERVKDAFIGEIDS

SEQ ID NO: 1053 - DNA, 1533 bp, Streptococcus pyogenes
atgagcatgcctagtttgtttgtaactttccaaaaccgttttaatgaatggctggcggctctgggggaacacctgcaaatttcccttttatctcttatgatcgccttgctaataggtgtgcctttagcagcccttctcagtcgcagcaaacgttggtcagacattatgttacaggtaacaggtgtttttcaaaccattccctcactggctttgcttggtcttttcatccctttaatgggaattggaacgttgcctgcagtgacagctttagttatctatgcgatttttccgattttacaaaacaccatcacaggattaaatggtattgacccaagtctcgtggaagcaggaatagcttttgggatgaccaaatgggagcgattgaaaacatttgagattccaattgccatgcctgttattatgtcaggtgtgcggacgtcagcagtcatgattatcggcacagctactttagcttccttgataggagccggtggacttggctctttcatcttattagggattgatcgtaataatgctaacctgattctgataggggctatttcttcagctctgctagctattattttcaatagtttgttacagtaccttgagaaagcttccttgcgacggattatgattagttttggaattaccttacttgcactgctagcatcgtatactcctatggcgcttagtcagttttcaaaaggaaaagatacagtggttattgccggtaaattgggagcagagcccgatattctgattaatctctataaggaattaattgaagaccaatcagatataagtgttgagttgaaatctaattttgggaaaactagcttcttatatgaagcccttaaatctggagatattgatatgtatcctgaatttacaggaaccataacatcaagtcttttacgcgacaaaccacctttgtctaatgaccctaagcaggtctatgaggatgctaaaaaaggcattgctaagcaagataaactgacccttctcaagccatttgcttaccaaaatacgtatgctgttgctatgccagaaaaattggctaaggaatatcagattgaaaccatttctgatttaaaagcgcatgctgatactttaaaggccggttttactttggaatttaaggacagagcagatggctataagggaatgcaatctcaatatggattacagctatctgtggcgacgatggagccagctcttcgttatcaagcaattcaatcaggagatatccaagtaacagatgcttactctacggatgctgaaattacgaaataccatttgaaagttttaaaggatgataaacagttgtttccaccttatcagggagctcctttgatgaaaacttccttattaacaaaacatccagaattaaaaggcattcttaatcaattagcgggaaaaattactgaaaaagagatgcaggacatgaactacgaggtatctgttaaaggagcagatgctaataaggtcgctcgagattatctgttgaaaacaggcttaatccagaaataa

SEQ ID NO: 1054 - protein, 510 aa, Streptococcus pyogenes
MSMPSLFVTFQNRFNEWLAALGEHLQISLLSLMIALLIGVPLAALLSRSKRWSDIMLQVTGVFQTIPSLALLGLFIPLMGIGTLPAVTALVIYAIFPILQNTITGLNGIDPSLVEAGIAFGMTKWERLKTFEIPIAMPVIMSGVRTSAVMIIGTATLASLIGAGGLGSFILLGIDRNNANLILIGAISSALLAIIFNSLLQYLEKASLRRIMISFGITLLALLASYTPMALSQFSKGKDTVVIAGKLGAEPDILINLYKELIEDQSDISVELKSNFGKTSFLYEALKSGDIDMYPEFTGTITSSLLRDKPPLSNDPKQVYEDAKKGIAKQDKLTLLKPFAYQNTYAVAMPEKLAKEYQIETISDLKAHADTLKAGFTLEFKDRADGYKGMQSQYGLQLSVATMEPALRYQAIQSGDIQVTDAYSTDAEITKYHLKVLKDDKQLFPPYQGAPLMKTSLLTKHPELKGILNQLAGKITEKEMQDMNYEVSVKGADANKVARDYLLKTGLIQK

SEQ ID NO: 1055 - DNA, 984 bp, Streptococcus pyogenes
atgtttaatgacatccctgtatttgattatgaagatattcaactgattcctaacaagtgcattattactagtcgttcacaagcagatacaagtgtgacactcggaaaataccagttcaagctaccagttatcccagcaaatatgcaaaccattattgatgaaacaattgctgagcagttggcaaaagagggttatttttatattatgcatcgttttgatgaagatagccgcaaaccttttatcaaacgcatgcatgaacaaggcttgattgcatcaatctctgttggggttaaagcttgtgaatatgaatttgtgacctctttgaaagaggatgctcctgagtttatcaccattgatattgctcatggtcatgctaacagtgttattgatatgattaagcatatcaagactgaattaccagaaacatttgtcattgctggaaatgttggtacgccagaagctgtacgagaactcgaaaatgcaggtgctgatgctactaaagtaggcatcggtccaggcaaagtatgtatcactaaagttaaaaccggtttcggtacaggtggttggcagctagcagcactgcgctggtgcgcaaaggcagctcgtaaacctatcattgctgatggtgggattcgcacacatggtgatattgctaaatccatccgctttggagctagtatggtcatgattggatcgctttttgcaggacattttgaaagtcctggaaaaacggtagaagtggatggtgaaacgtttaaagaatattatggctcggcgtcagaatatcaaaaaggcgagcataaaaatgtagaaggcaaaaaaatcttattgcctacaaaaggtcacttatcagataccctgaccgaaatgcaacaggatttgcaatcgtccatttcttacgcgggtggtaaagatttagacagtttgcgtcatgttgattatgttatcgtcaaaaattctatttggaatggtgattccatttaa

SEQ ID NO: 1056 - protein, 327 aa, Streptococcus pyogenes
MFNDIPVFDYEDIQLIPNKCIITSRSQADTSVTLGKYQFKLPVIPANMQTIIDETIAEQLAKEGYFYIMHRFDEDSRKPFIKRMHEQGLIASISVGVKACEYEFVTSLKEDAPEFITIDIAHGHANSVIDMIKHIKTELPETFVIAGNVGTPEAVRELENAGADATKVGIGPGKVCITKVKTGFGTGGWQLAALRWCAKAARKPIIADGGIRTHGDIAKSIRFGASMVMIGSLFAGHFESPGKTVEVDGETFKEYYGSASEYQKGEHKNVEGKKILLPTKGHLSDTLTEMQQDLQSSISYAGGKDLDSLRHVDYVIVKNSIWNGDSI

SEQ ID NO: 1057 - DNA, 591 bp, Streptococcus pyogenes
atggagtatctagctagtatcattgaatcaggtgatgcccttgttttaccaacagaaacggtttatggtctttttgccaaggctttagatgaaaaagcagtaaatgctgtttatgacttaaaacaaagaccccgagataaagcaatgaaccttaatgtggctgattttaatagtatcttagccttttcaaaagaacagccgagatacctcaagaaattataccaagcctttttaccaggtccgttaacgattattttaaaagctaatgaccaggttccttattggattaattcgggactttcaacggttggttttcgcttacccagtcatccaattaccgcagctttaattcaaaaaacaggccctttaattggtccttctgcaaacttatctggcaaagctagtggtcgagtttttgatcatattatgcaagattttgactttcaagtgtttggttatgcagatgatccttttctaacaggtaaggattcaaccatcttagacttatcaggtgagcgtgctgtgattttacgtcaaggtgctatcaccaaagaagaattattagctaacgtgcctgaacttcgcttttaa

SEQ ID NO: 1058 - protein, 196 aa, Streptococcus pyogenes
MEYLASIIESGDALVLPTETVYGLFAKALDEKAVNAVYDLKQRPRDKAMNLNVADFNSILAFSKEQPRYLKKLYQAFLPGPLTIILKANDQVPYWINSGLSTVGFRLPSHPITAALIQKTGPLIGPSANLSGKASGRVFDHIMQDFDFQVFGYADDPFLTGKDSTILDLSGERAVILRQGAITKEELLANVPELRF

SEQ ID NO: 1059 - DNA, 1257 bp, Streptococcus pyogenes
atgatttttgataaaggtaatgttgaagactttgataaagagctttgggatgccattcatgctgaagaagaaagacaagaacatcatatcgaattgattgcatctgaaaacatggtttcaaaagctgtcatggcagctcaaggttctgttttaaccaataagtatgcagaaggctatccaggtaatcgctattatggtggaacagaatgtgtggatattgtcgaaacgcttgctattgaacgtgctaagaaacttttcggtgccgcatttgccaatgttcaagcccattccggaagtcaagccaatgcagcagcttatatggccttgattgaggctggtgacaccgtattaggaatggatttggctgcaggtggtcatctcacgcatggctctccagtaaatttttctggaaaaacctaccattttgtgggttactcagtagatactgatactgaaatgttaaattatgaggcgattttagaacaagcaaaggcggtccaaccaaagcttatcgttgcaggggcttcggcctactctagaagcattgattttgaaaagtttcgtgccattgctgatcacgtaggtgcttacttaatggtggacatggctcacatcgctggccttgtagcagcaggtgtgcacccgagtcctgtcccttatgcgcatattgtgacatcaacaacccataaaaccttacgtggtcctcgtggaggcttgatattaaccaatgacgaagctcttgctaaaaagattaattcggccgttttccctggtttacaaggaggacctctggaacacgtgattgctgccaaagcggttgccttcaaagaagccttggatccagcctttaaagactatgcacaagctattattgataatactgcggctatggcagcagtttttgcacaagatgatcgtttccgtctgatctcaggtggtacagataatcatgtctttttagtagatgtcactaaggttattgctaatggtaaactagcgcaaaatcttctggatgaggttaatattacccttaataaaaatgccattccttttgaaaccttgtcgccatttaaaacctcaggtattcgcattggttgtgctgccataaccagccgtggtatgggtgttaaagagagtcagaccattgcccgtcttatcatcaaagccttggttaatcatgatcaagaaactattcttgaagaagtccgtcaggaagtgcgtcagttaaccgatgccttcccactctataaaaagtaa

SEQ ID NO: 1060 - protein, 418 aa, Streptococcus pyogenes
MIFDKGNVEDFDKELWDAIHAEEERQEHHIELIASENMVSKAVMAAQGSVLTNKYAEGYPGNRYYGGTECVDIVETLAIERAKKLFGAAFANVQAHSGSQANAAAYMALIEAGDTVLGMDLAAGGHLTHGSPVNFSGKTYHFVGYSVDTDTEMLNYEAILEQAKAVQPKLIVAGASAYSRSIDFEKFRAIADHVGAYLMVDMAHIAGLVAAGVHPSPVPYAHIVTSTTHKTLRGPRGGLILTNDEALAKKINSAVFPGLQGGPLEHVIAAKAVAFKEALDPAFKDYAQAIIDNTAAMAAVFAQDDRFRLISGGTDNHVFLVDVTKVIANGKLAQNLLDEVNITLNKNAIPFETLSPFKTSGIRIGCAAITSRGMGVKESQTIARLIIKALVNHDQETILEEVRQEVRQLTDAFPLYKK

SEQ ID NO: 1061 - DNA, 414 bp, Streptococcus pyogenes
atgaaactaaatgccattcatcacgttgctattattgtatctgattatcatctgtcaaaagatttttatgtgaataaactcggatttgaaattatcagagaaaattatcgtcctgacaagcatgattacaaattagatttatcttgtggtcgtattgaattggagatttttggtaaggtgacaagtgaccccaactatcaagctcctcctaaacgtgtaagtgaaccagaatttaaaagtgaggcctgtggtttgaggcaccttgcatttcgtgttaccaacattgagagttatgtagatgatctaaagagcttaggaattccagtggagcctatcaggcatgatgattacacaggtgagaaaatgactttcttttttgatccggatggtttgcctttagaattacatgaatag

SEQ ID NO: 1062 - protein, 137 aa, Streptococcus pyogenes
MKLNAIHHVAIIVSDYHLSKDFYVNKLGFEIIRENYRPDKHDYKLDLSCGRIELEIFGKVTSDPNYQAPPKRVSEPEFKSEACGLRHLAFRVTNIESYVDDLKSLGIPVEPIRHDDYTGEKMTFFFDPDGLPLELHE

SEQ ID NO: 1063 - DNA, 120 bp, Streptococcus pyogenes
atgaaaaaaagaaattttaaacttacagaaatgttacaattggttttattagtggttcctgctgtaaaacttgctaaaaaaatgtttaacgatagtaaaacaccgtctaaaagaaagtag

SEQ ID NO: 1064 - protein, 39 aa, Streptococcus pyogenes
MKKRNFKLTEMLQLVLLVVPAVKLAKKMFNDSKTPSKRK

SEQ ID NO: 1065 - DNA, 993 bp, Streptococcus pyogenes
atgaaattaaaattatataatgttagaggcgaagaagcagtcttagcaaaaaaatgggctgatgacaatgggattgagatttccttgacggagtctcccttaactcctgaaacggttaaagaagctgaaggctttgacgggattgccaatgcccaaattggtcctttagatgatgcgatttatcctctcttaaaggaaatggggattaaacaaatcgctcagcacagtgctagtgtcgatatgtataaccttgatttggccaccgaaaatgacattattatcacaaatgttcctagctattctccagaatccattgcagaatttacggttactattgtccttaatttaattcgtcatgtggagttgattcgtgaaaatgttaaaaaacaaaatttcacttggggactccctatccgcggccgtgttttaggtgatatgacagttgcgattatcggaactggacgtattggtctagctactgctaaaatctttaaaggttttggctgcaaggtcgttggatatgatatttaccaaagcgatgctgccaaagctgtcttggactataaggaatctgtagaagaagcgattaaagatgctgatcttgtttccttacacatgccaccaactgcagagaacacacaccttttcaattctgatttatttaaatcattcaaaaaaggggctattttgatgaatatggcgcgtggtgccgtcattgagacgcaagatttactggatgctttggatgcaggcttactgagcggagctggtattgacacttacgaatttgaaggaccttatatacctaagaattttgaaggtcaagaaattacagattcactatttaaagctttgattaaccatcctaaggttatttatacacctcatgcagcttattatactgatgaagccgttaaaaacctagttgaaggtgcccttaatgctacagtagagattatcaaaactgggacaacgacaactcgtgttaactaa

SEQ ID NO: 1066 - protein, 330 aa, Streptococcus pyogenes
MKLKLYNVRGEEAVLAKKWADDNGIEISLTESPLTPETVKEAEGFDGIANAQIGPLDDAIYPLLKEMGIKQIAQHSASVDMYNLDLATENDIIITNVPSYSPESIAEFTVTIVLNLIRHVELIRENVKKQNFTWGLPIRGRVLGDMTVAIIGTGRIGLATAKIFKGFGCKVVGYDIYQSDAAKAVLDYKESVEEAIKDADLVSLHMPPTAENTHLFNSDLFKSFKKGAILMNMARGAVIETQDLLDALDAGLLSGAGIDTYEFEGPYIPKNFEGQEITDSLFKALINHPKVIYTPHAAYYTDEAVKNLVEGALNATVEIIKTGTTTTRVN

SEQ ID NO: 1067 - DNA, 1407 bp, Streptococcus pyogenes
atgatgttattaacaatgctggcttatgccatgattattgtctttatgtacgtggtaatgaagaaaaaaatgaccccttttactgctttggtcatgattccattaatcatgacgattgctgttatactgactggttcagctgacttcaatgcagatgccaaatttgttgcctttgttggtgacggtggaattgctaaagacctaacagctatcggaccaatggttatgtatggtatcaacaatactgctaaaacaggtatcatgttgctatttgccattttgttcttctctgtcatgttagatgcaggattgtttgatccgattactgaaaagatgattcgctttgctaaaggtgatccaatgaaggtgcttatcgcaacagctgtcgttgctgctgcagtatctcttaatggtgatggaacaaccactactttaatttgttgctctgctttcttacctatctataaaaaattggacatgaaaatcatgaacctaggtgtcttgattattcttcaaaatactattatgaacttactgccatggggtggccctactgctcgtgcgatgtctgttcttggtgtcggtcctgaaattcttggctatcttgcaccgggtatgattttatctcttctttatgtgatttgttgggttgctccaagcatggggcgtaaagaacgtgcaagacttggtgttattgacttgtctgaagaagacatgcgtcaactcacagacattactgacccagataccctttttattcgtcgtcctaaaaactttgttttcaatgctatcttaaccattggattaatcacttggttagttgctggctctttcaacaaatctattgctatggcaccgcttcttctttttgcggtgggaacttgtatcgccttgatggtcaattacccagtgcttaaagatcaatcaaaacgcattggtgacaatgctggtgatgcggttcaagtggttattctcgtctttgctgctggtatctttatgggtctttttcaaggttctggtatggctagcgctcttgcacaaagttttgcaaccattattccaaaacaactggcaggtttctggggtctcgttattgccttagtttctgcacctggtaccttctttatctccaatgatggtttttactatggtatcttgcctgttcttgcagaagctggtgctgaatatggtttcagtaacatggctatggcacttgcttccctcatgggacaagccttccacttacttagtccattagttgccttcatttatcttcttcttcgcttgacaggtcttgacatgggggaatggcaaaaagaggctgctaaatatgcccttatcatctttgttatctttgtggtaaccattattgccatgggacaaatgccactttacattccacaataa

SEQ ID NO: 1068 - protein, 468 aa, Streptococcus pyogenes
MMLLTMLAYAMIIVFMYVVMKKKMTPFTALVMIPLIMTIAVILTGSADFNADAKFVAFVGDGGIAKDLTAIGPMVMYGINNTAKTGIMLLFAILFFSVMLDAGLFDPITEKMIRFAKGDPMKVLIATAVVAAAVSLNGDGTTTTLICCSAFLPIYKKLDMKIMNLGVLIILQNTIMNLLPWGGPTARAMSVLGVGPEILGYLAPGMILSLLYVICWVAPSMGRKERARLGVIDLSEEDMRQLTDITDPDTLFIRRPKNFVFNAILTIGLITWLVAGSFNKSIAMAPLLLFAVGTCIALMVNYPVLKDQSKRIGDNAGDAVQVVILVFAAGIFMGLFQGSGMASALAQSFATIIPKQLAGFWGLVIALVSAPGTFFISNDGFYYGILPVLAEAGAEYGFSNMAMALASLMGQAFHLLSPLVAFIYLLLRLTGLDMGEWQKEAAKYALIIFVIFVVTIIAMGQMPLYIPQ

SEQ ID NO: 1069 - DNA, 579 bp, Streptococcus pyogenes
atgtgtaaagacacttatttttcaggcgaagctatccaacttagtgatatgttaagagcccgcgaagaaagagctctgcgtcagctgcatttattaaaggagtacccagaaggtagcttattatcggtcaccatgaatatccctggaccaattaaaacctctcctaaacttcttgaagcttttgatatagtgattaaggccattcaaactgccttagctgacgataagatttgttaccagttgcgattactgcctacaacgggttatgagtattacctcatcacaagtctacctagccgcgacctgaagttaaaaatgatagccttagagacagagttgccaataggtcgtctcatggatttagatgtcttggtcttgcaaaatgatctgcctcattcaattagcagaaccgtattaggaggctcccctaggcaatgttttatctgttctaaagaggccaaagtctgcggtcgcctacgtaagcacagtgtcgaggagatgcagactgctatttcaaaattactccattcatttttcaataaagacaaccaatcatcgtcatcagataagacaggttga

SEQ ID NO: 1070 - protein, 192 aa, Streptococcus pyogenes
MCKDTYFSGEAIQLSDMLRAREERALRQLHLLKEYPEGSLLSVTMNIPGPIKTSPKLLEAFDIVIKAIQTALADDKICYQLRLLPTTGYEYYLITSLPSRDLKLKMIALETELPIGRLMDLDVLVLQNDLPHSISRTVLGGSPRQCFICSKEAKVCGRLRKHSVEEMQTAISKLLHSFFNKDNQSSSSDKTG

SEQ ID NO: 1071 - DNA, 1410 bp, Streptococcus pyogenes
atgaggagaacaattatgacgaaaatccgtataacggaaacagttttacgtgatggtcaacaaagtcagattgccacacgtatgacaaccaaggaaatgattcctattctcgaaacgctagacaatgctggttatcatgcccttgaaatgtggggaggagcaacctttgattcctgcctacgctttttaaatgaagacccttgggaacggctaagagccatccgtaaagcagtgaaaaagactaaacttcagatgctcttacgcggacaaaaccttcttggatatcgcaattatgctgacgatgtggtcagatcctttattcaaaaatccattgaaaatgggattgatattgtccgtattttcgatgctttaaacgacccacgcaacttgcaaacagctgtttcagcgactaaaaaatttggagggcatgctcaagttgccatttcttacacgacaagtccggtacataccattgactactttgttgaattggcgaaagcttaccaagctatcggagcggactccatttgtatcaaagacatggctggtgtcttaactcctgaaataggttaccaattggtcaaatgtatcaaggagaatacaactatccctcttgaggttcatacccatgctaccagtggtatttcagaaatgacttacttaaaagtagcagaagcaggagctgatattattgatacggcgatttcctctttttcagggggaaccagtcagcctgccacagagtcaatggcgattgccttgacggatttaggctttgacacaggcttggatatgcaagaggtggccaaagttgcagaatatttcaacactattcgtgaccactatcgagaaatagggattttaaatcctaaagtcaaagatactgagccaaaaacattgatttaccaagttccaggtggcatgctatcaaacctattgagccaattaaccgagcaaggcctaactgataaatacgaagaagtcttagcagaagtacctaaagtaagggctgatcttgggtatccgccactcgtaacgccattatcacaaatggttggcacacaggccttgatgaatatcatctcaggggaacgttacaaggtagttccaaatgaaatcaaagactatgttcgagggctatacggtcaatcaccagcgccattagcagaaggtatcaaagagaaaatcattggtgacgaagcagttattacttgcagaccagccgacctaatcgagcctcaaatgatttatctacgtgacgagattgctccatacgctcattcagaagaagacgtgttaagctatgcaagcttcccgcaacaagctagagatttcttgggacgccgtgaagatcctttctatgatgttccggttcaagaagttactgtacaactggacattcaagactaa

SEQ ID NO: 1072 - protein, 469 aa, Streptococcus pyogenes
MRRTIMTKIRITETVLRDGQQSQIATRMTTKEMIPILETLDNAGYHALEMWGGATFDSCLRFLNEDPWERLRAIRKAVKKTKLQMLLRGQNLLGYRNYADDVVRSFIQKSIENGIDIVRIFDALNDPRNLQTAVSATKKFGGHAQVAISYTTSPVHTIDYFVELAKAYQAIGADSICIKDMAGVLTPEIGYQLVKCIKENTTIPLEVHTHATSGISEMTYLKVAEAGADIIDTAISSFSGGTSQPATESMAIALTDLGFDTGLDMQEVAKVAEYFNTIRDHYREIGILNPKVKDTEPKTLIYQVPGGMLSNLLSQLTEQGLTDKYEEVLAEVPKVRADLGYPPLVTPLSQMVGTQALMNIISGERYKVVPNEIKDYVRGLYGQSPAPLAEGIKEKIIGDEAVITCRPADLIEPQMIYLRDEIAPYAHSEEDVLSYASFPQQARDFLGRREDPFYDVPVQEVTVQLDIQD

SEQ ID NO: 1073 - DNA, 699 bp, Streptococcus pyogenes
atgttttctggacatcaactaaaaacagcacgattatcaaagggaataactcaatcagaattgggaagattgttgcatgtcaataaaatgacaatatctaattgggaaaaaggtaagaatataccaaatgaaaaacatttaaatgccttattgcatctattcaatgtgacatctgattatttcgacccaaactatagattgctaacgccttataaccagctgacaatatctaataaagaaaaagtaattggctattcagagcgattgttaaatcatcaaatagacaaaaaatctaaagatctcatagataaaccatcacaattatatgcttatcgggtctatgaaagtttatctgctggtactggttactcctattttggtgatggtaactttgatgttgtcttttacgatgaacaattagaatacgattttgcgtcttgggtttttggagattctatggagccaacttatttaaatggtgaagttgttcttataaaacaaaatagttttgattacgatggagcaatttatgcagtcgaatgggatgggcaaacatatatcaaaaaggtatttcgtgaagatgagggattacgtctagtgtccttaaataaaaaatattctgataagtttgctccctatagcgaagaacctcgcattattggcaaaattatcgctaattttaggcccttagaaatttaa

SEQ ID NO: 1074 - protein, 232 aa, Streptococcus pyogenes
MFSGHQLKTARLSKGITQSELGRLLHVNKMTISNWEKGKNIPNEKHLNALLHLFNVTSDYFDPNYRLLTPYNQLTISNKEKVIGYSERLLNHQIDKKSKDLIDKPSQLYAYRVYESLSAGTGYSYFGDGNFDVVFYDEQLEYDFASWVFGDSMEPTYLNGEVVLIKQNSFDYDGAIYAVEWDGQTYIKKVFREDEGLRLVSLNKKYSDKFAPYSEEPRIIGKIIANFRPLEI

SEQ ID NO: 1075 - DNA, 1560 bp, Streptococcus pyogenes
atggcttttgaaagcttaacccaacgtttgcaagatgtgtttaaacacattcgcggtaaaaagaaattatcagaatcagatgttcaagaagtgacaaaagagattcgtctagctcttttagaagccgatgtcgctttaccagttgttaaaacctttattaagcgcgtacgtgagcgcgctattggccatgagattattgatactcttgatccaacacaacaaattcttaagattgttaatgaagaattaacgagtattttaggctcagaaactgcagagattgataaatctccaaaaattccaactattatcatgatggtcggtttgcaaggggctggtaaaacaacttttgcaggaaaactcgctaataaattaattaaagaagaaaacgcgcgaccactgatgattgctgccgatatttaccgtccagcggccattgatcagttaaaaacactggggcaacaaatcaatgtacctgtttttgatatggggacagaccactcagcagtcgatattgtcagaaaaggtttggaacaagctcgtgaaaaccacaatgactatgtcttgattgatactgcgggtcgcttgcaaattgatgaaaaactgatgggagagctgcgcgatgtcaaggctttagcacaaccaaatgaaattcttttggttgtagatagcatgattggtcaagaagctgccaatgtagcctacgagtttaatcatcagttgagcatcacaggggttgtgttaacaaagattgatggtgatacacgtggaggtgcggcgctatctgtccgtgaaatcactgggaaaccaattaaatttacaggtattggtgaaaaaatcacagatattgaaacatttcacccagaccgcatgtccagtcggattttgggaatgggggatttgcttaccctcattgaaaaagctagccaggaatatgatgagaaaaaatccttagagttagctgaaaaaatgcgtgaaaacacctttgatttcaatgattttattgaacagttagatcaagtgcaaaatatggggcctatggaagacctcttgaaaatgattccaggaatggctggtaacccagctttggccaatatcaaagttgacgaaaaccaaattgctcgcaaacgtgctattgtctcttcaatgacacccgctgaacgtgaaaatcctgacttactaaacccgagtcgtcgccgtcgtattgcagctggttccgggaacagctttgtagataataaatttatcaaagactttaaccaagccaaaagcatgatgcaaggggttatgtcgggcgatatgtctaaaatgatgaaagatatgggtattaatcccaataatcttcctaaaaacatgcctgctggtatgccagatatgtcttccttagaaggaatgatgggacaaggtggtatgcctgatttatctggccttggtggtgatatggatatgagtcaactatttggtaaagggtttaaaggaaaaattggccaatttgccatgaaacaggccatgaaacggcaggctaacaaactaaaaaaagcaaagaaaaaacgaaaataa

SEQ ID NO: 1076 - protein, 519 aa, Streptococcus pyogenes
MAFESLTQRLQDVFKHIRGKKKLSESDVQEVTKEIRLALLEADVALPVVKTFIKRVRERAIGHEIIDTLDPTQQILKIVNEELTSILGSETAEIDKSPKIPTIIMMVGLQGAGKTTFAGKLANKLIKEENARPLMIAADIYRPAAIDQLKTLGQQINVPVFDMGTDHSAVDIVRKGLEQARENHNDYVLIDTAGRLQIDEKLMGELRDVKALAQPNEILLVVDSMIGQEAANVAYEFNHQLSITGVVLTKIDGDTRGGAALSVREITGKPIKFTGIGEKITDIETFHPDRMSSRILGMGDLLTLIEKASQEYDEKKSLELAEKMRENTFDFNDFIEQLDQVQNMGPMEDLLKMIPGMAGNPALANIKVDENQIARKRAIVSSMTPAERENPDLLNPSRRRRIAAGSGNSFVDNKFIKDFNQAKSMMQGVMSGDMSKMMKDMGINPNNLPKNMPAGMPDMSSLEGMMGQGGMPDLSGLGGDMDMSQLFGKGFKGKIGQFAMKQAMKRQANKLKKAKKKRK

SEQ ID NO: 1077 - DNA, 1566 bp, Streptococcus pyogenes
atgacagttaaggaagaaacgatgagtattttagaagttaagcagttgagtcacggttttggggatcgggctatttttgaaaatgtgtcatttcgcctcttaaaaggcgaacatattggactagttggggcaaatggtgaaggaaaatcaacctttatgagtatagtcacaggacatttacagcctgacgaaggaaaagtagagtggtcgaagtatgtcactgcaggttacctggatcaacatacagtgttggaatcaggacaaaccgttcgtgatgtcttgcgaactgcttttgatgagttatttaagaccgagaatcgtattaatgagatttacgcgtcaatggcagatgataaagctgatattgctgttttgatggaagaagtaggtgagcttcaagatcgtttagaaagtcgtgatttctatactttggatgctaagattgatgaagtagcgcgtgcgcttggtgttatggattttggaatggagtcagatgttacatccttatcaggtgggcaacgaacaaaggttttattagccaaattactattagaaaaacctgatattctgctattagatgaaccaactaaccatttggatgctgagcatattgaatggttaaaacgctatttacaacattatgaaaatgcttttgtgttgatttcgcatgatatttctttcttaaatgatgtgattaatattgtttatcatgttgaaaatcaaagtttagttcgctatactggggattattaccaatttcaagctgtttatgagatgaaacaatctcaacttgaagcagcctatgaacgtcaacaaaaagagattgctaacttgcaggattttgtcaaccgaaataaggctcgggtagcgacacgtaacatggcaatgtctcgccaaaaaaaacttgataagatggatataattgaacttcaagctgagaaaccaaaaccaaattttgaatttaagcaagctagaactcccagtcgattcatttttcaaacaaaaaatcttgtgattggttatgattacccattgaccaaagaacccttaaatataacgtttgaaagaaatcaaaaaattgctattgttggggccaacggtattggaaaatctactttgctaaaaagtttattaggtgttattgagcctttagaaggtcatattgtcacaggggattttttagaagttggctactttgaacaagaagtgacaggtgttaaccgacaaactccgctagaagtagtttgggatgcttttcctgccttaaatcaggcagaagttcgagcggcactagctcgttgcggactaacatcaaaacatatcgaaagtcaaattcaagtactttcgggtggtgaacaagcaaaagttcgtttttgtttgttgatgaatcgtgaaaataacgtgcttattttagacgaaccaacaaatcatcttgatattgatgctaaaaatgagctcaaacgtgctttaaaagcatataagggttctattttaatggtttgtcatgaacctgatttctacaatgggtgggtaaccgatacttgggattttagtaagttaacctaa

SEQ ID NO: 1078 - protein, 521 aa, Streptococcus pyogenes
MTVKEETMSILEVKQLSHGFGDRAIFENVSFRLLKGEHIGLVGANGEGKSTFMSIVTGHLQPDEGKVEWSKYVTAGYLDQHTVLESGQTVRDVLRTAFDELFKTENRINEIYASMADDKADIAVLMEEVGELQDRLESRDFYTLDAKIDEVARALGVMDFGMESDVTSLSGGQRTKVLLAKLLLEKPDILLLDEPTNHLDAEHIEWLKRYLQHYENAFVLISHDISFLNDVINIVYHVENQSLVRYTGDYYQFQAVYEMKQSQLEAAYERQQKEIANLQDFVNRNKARVATRNMAMSRQKKLDKMDIIELQAEKPKPNFEFKQARTPSRFIFQTKNLVIGYDYPLTKEPLNITFERNQKIAIVGANGIGKSTLLKSLLGVIEPLEGHIVTGDFLEVGYFEQEVTGVNRQTPLEVVWDAFPALNQAEVRAALARCGLTSKHIESQIQVLSGGEQAKVRFCLLMNRENNVLILDEPTNHLDIDAKNELKRALKAYKGSILMVCHEPDFYNGWVTDTWDFSKLT

SEQ ID NO: 1079 - DNA, 687 bp, Streptococcus pyogenes
atgaaattaataataacatcaggtggaacaactgaacctatagatgcagtacgaggtatcactaatcactcaactgggcaacttggaaaattaatcacagagcgatttttacaatatcatcatgacgttaccctagtcactactaaaacagccactaaacccctgccaaataagcgcctaaggattattgaagtggaaacagttaacgacttaatggctgcactcaaagatcaggttcctcaccatgacattctaattcatagtatggctgtttctgactatactccagtctacatgactgatttggaacaagtctctcaagctgataaccttaattgttttctatgtgaacataacagtgagccgaaaatctcatctgcatctgattatcaggttctttttttgaaaaaaacacccaaagttatctcttatgttaaacagtggaatcctaatattaaactagtcggctttaaacttctagttaatgtgcctcaagaagagttaattaaagtagccagagcaagtctagctaaaaatcatgctgattatattctcgccaatgatttagttgatatccaaacaggtatgcacaaggctcttttgatatccaataacgaagttgcatctgcagataccaaagaggcaattgctgacttattatatgaaaggatgaccaaacatgactaa

SEQ ID NO: 1080 - protein, 228 aa, Streptococcus pyogenes
MKLIITSGGTTEPIDAVRGITNHSTGQLGKLITERFLQYHHDVTLVTTKTATKPLPNKRLRIIEVETVNDLMAALKDQVPHHDILIHSMAVSDYTPVYMTDLEQVSQADNLNCFLCEHNSEPKISSASDYQVLFLKKTPKVISYVKQWNPNIKLVGFKLLVNVPQEELIKVARASLAKNHADYILANDLVDIQTGMHKALLISNNEVASADTKEAIADLLYERMTKHD

SEQ ID NO: 1081 - DNA, 570 bp, Streptococcus pyogenes
atgaatcaccgtaaatcagcagatatttctcgtattgctatcttttttgccatcatgttagtcattcattttgtgagcagtcttgtctttaatatttggcctattccaatcaaaccaacgcttgtccatatcccagttattattgcttctgtcttatatggcccaaggataggtgctattttaggaggattaatggggattataagtgtcattacaaataccatcattctactgcctacaaattatctcttttcaccttttgtcgatcatggaactttcgcttctttaataattgctattatcccacgtattctgattggtattaccccttattattgctataaattgattcctaatcagtttggtttaatagtatccggtatcattggttctctaacaaatactatatttgtattatctgggatatttatttttttcgcgacagtttttgatggaaatattaaagcactactaacagccatcatctcatcaaacgctattgttgagatgatcatctcagctattattacctttgtacttattccaacactatcaagactaaaaaggtaa

SEQ ID NO: 1082 - protein, 189 aa, Streptococcus pyogenes
MNHRKSADISRIAIFFAIMLVIHFVSSLVFNIWPIPIKPTLVHIPVIIASVLYGPRIGAILGGLMGIISVITNTIILLPTNYLFSPFVDHGTFASLIIAIIPRILIGITPYYCYKLIPNQFGLIVSGIIGSLTNTIFVLSGIFIFFATVFDGNIKALLTAIISSNAIVEMIISAIITFVLIPTLSRLKR

SEQ ID NO: 1083 - DNA, 957 bp, Streptococcus pyogenes
atgagtttagtaacaatttttgccttattgatgtcatctatgcttatttatgcaacaccactcattttcacaagtattggaggaactttctcagagcgctcaggcgttgttaatgttggtttagaaggtatcatggtcatgggagcgttctctgggattgttttcaacttagagtttgctgaaacatttggaaaagcaacgccttggatagccgttttagtcggtggtattgttggtttgattttttctttgattcacgctgtagcaaccatcaactttcgagctgaccacattgtcagtggtacagtgttgaacttgttagcaccttcttttgctgtcttcttggttaaagctatgtacggtaagggacaaacagacaacattcaacaatcttttgggaagtttgatttcccaggtttatcacaaattcctgtgattggtgatattttctttaaaaatactagccttattggttacttcgccattgctttttcgttctttgcttggtttttgctttataaaaccaggtttggtctgcgtttacgatcagttggggaacaccctcaggcagctgacacacttggtattaacgtctatttgatgaaatactatggtgtgatgatctcaggttttcttggtggaataggtggagctgtttatgctcagtcaatctccgttaactttgctgtaacaactatcttaggtcctggatttattgctttggcagctatgatctttggtaaatggaatccagttggcgccatgctatctagtcttttctttggcttatcgcaaagtttagccgttattggtgctcaattaccattactagaaaagattccaacggtttacttacagattgcaccttatatggtaacgattattattttagctgctttctttggtcaagcagttgcaccaaaagctgatggaatcaactatattaaatctaaataa

SEQ ID NO: 1084 - protein, 318 aa, Streptococcus pyogenes
MSLVTIFALLMSSMLIYATPLIFTSIGGTFSERSGVVNVGLEGIMVMGAFSGIVFNLEFAETFGKATPWIAVLVGGIVGLIFSLIHAVATINFRADHIVSGTVLNLLAPSFAVFLVKAMYGKGQTDNIQQSFGKFDFPGLSQIPVIGDIFFKNTSLIGYFAIAFSFFAWFLLYKTRFGLRLRSVGEHPQAADTLGINVYLMKYYGVMISGFLGGIGGAVYAQSISVNFAVTTILGPGFIALAAMIFGKWNPVGAMLSSLFFGLSQSLAVIGAQLPLLEKIPTVYLQIAPYMVTIIILAAFFGQAVAPKADGINYIKSK

SEQ ID NO: 1085 - DNA, 1533 bp, Streptococcus pyogenes
atgacacagcatgtcattgaaatgagagaaatcacgaaaaaatttggtgattttgttgcaaatgaccacattaacttaaatgtcagaaaaggtgagattcatgccttattgggtgaaaatggggcaggtaaatcaactttgatgaatatgctagctggtctcttagagcctactagtggagaaattgtcattaatgacaagccagttcaaattgattcgccatctaaatcagctaagcttggtatcggaatggtacatcaacatttcatgttagtagaagccttcacggttgctgagaatattattttaggaaatgaagtagtaaaaaatgggtgcttagatcttaaccaagcatcgaaagatattaaggtactatccgaaaaatatggccttgcaatcaatccatcagctaaagtttctgatatttcagtaggagcacaacaacgtgttgagattttgaaaaccttgtatcgtggtgcagatattcttatctttgatgagccaactgccgttttaacacctgcagaaattaaagaattgatgactatcatgaagaatctcgtgaaagaaggaaaatcaattattttaattacccataaactggacgagattcgtgctgtcgccgaccgtgtcacagttattcgtcgtggtaagagtatcgaaacagttgatgtggcaggagcaacttcacaagatttagctgagatgatggtgggacgctcggtttcctttacaactagcaaaaaagctgctgaaccaaaagatgtggtcttatccatcaaaaatcttgaagtagatgaaaatagaggggttccagcagttaaggggctatctctagatgtccgagctggtgaaattgtagggattgctggaattgacggaaatggtcaatctgagttaattcaagctattacaggtttacgtaaagtcaaatctggaagtattatgattaaaaacaatgaagtcactcatttgtcttcacgcaaaattactgagttatcagtgggtcacgtgccagaagatcgtcatcgagatggtttgatactagatctttctttagctgaaaatacagccttacaaacctattacaaacaacctctaagtcaaaatggaatcttaaattatactaaaattaatgactatgctcgtcaattaatgaaagaatttgatgttcgcggagccaatgagctagtaccagctagaggattttctggtggtaaccaacaaaaggccattattgctcgtgaagtggaccgtgatccagatttacttattgttagccaaccaacacgtggtcttgatgtaggagctattgaatatatccataagcgtttgattaaagaacgtgataaaggtaaagctgtcctcgttgttagttttgaacttgatgaaatattgaatttatctgatcgaattgctgttattcatgatggtaaaattcaaggtatcgtatcgccagaaaataccaataaacaagaattgggtattttaatggcaggtggttcaattcataaggaggaaggtcatgtctaa

SEQ ID NO: 1086 - protein, 510 aa, Streptococcus pyogenes
MTQHVIEMREITKKFGDFVANDHINLNVRKGEIHALLGENGAGKSTLMNMLAGLLEPTSGEIVINDKPVQIDSPSKSAKLGIGMVHQHFMLVEAFTVAENIILGNEVVKNGCLDLNQASKDIKVLSEKYGLAINPSAKVSDISVGAQQRVEILKTLYRGADILIFDEPTAVLTPAEIKELMTIMKNLVKEGKSIILITHKLDEIRAVADRVTVIRRGKSIETVDVAGATSQDLAEMMVGRSVSFTTSKKAAEPKDVVLSIKNLEVDENRGVPAVKGLSLDVRAGEIVGIAGIDGNGQSELIQAITGLRKVKSGSIMIKNNEVTHLSSRKITELSVGHVPEDRHRDGLILDLSLAENTALQTYYKQPLSQNGILNYTKINDYARQLMKEFDVRGANELVPARGFSGGNQQKAIIAREVDRDPDLLIVSQPTRGLDVGAIEYIHKRLIKERDKGKAVLVVSFELDEILNLSDRIAVIHDGKIQGIVSPENTNKQELGILMAGGSIHKEEGHV

SEQ ID NO: 1087 - DNA, 594 bp, Streptococcus pyogenes
atgacaaagatgtattatgatgaaaatccagatagcctacacgatattcatgaagtaaaagtagagctgcttaatcatccctttacttttttgacggattcaggtgtcttttcaaagaaaatggttgatttcggtagccaagtattattaaagacactaaatttcaaggagaacgaacgtgtactggacttaggttgcggctatggccctcttgggattagtctagccaaggttcaaagggtagacgcaaccttagtggacatcaataatcgtgctcttgatttagctagaaaaaatgcaactaataaccaagtggcagtaactatttttcaatcaaatatttatgaaaatattagtggccattttgagcatattattagtaatcctcctattagagcaggaaagagagtagttcatagtattattgaaaaaagcatagattttttagtggttaatggtgacttaacgattgtgattcaaaaaaaacaaggagctcctagcgctaaagcaaaaatggcaactatttttggtaatgttgagatattaaggaaagataaaggttattatgtattaagaagtataaagcaagcctaa

SEQ ID NO: 1088 - protein, 197 aa, Streptococcus pyogenes
MTKMYYDENPDSLHDIHEVKVELLNHPFTFLTDSGVFSKKMVDFGSQVLLKTLNFKENERVLDLGCGYGPLGISLAKVQRVDATLVDINNRALDLARKNATNNQVAVTIFQSNIYENISGHFEHIISNPPIRAGKRVVHSIIEKSIDFLVVNGDLTIVIQKKQGAPSAKAKMATIFGNVEILRKDKGYYVLRSIKQA

SEQ ID NO: 1089 - DNA, 2538 bp, Streptococcus pyogenes
atgaagacagtagaacatctcatcgaaacatttgtgcctgaaaattataacatctttttagatattaatcgtcagactaaaacatttacggggaatgttgcgattaatggtgaagctttagataatcatgtggctttccaccaaaaagatttggacattaagtctattttgctcgataatgaagctgttatttatcaagtggataacgacaatgaagttgtgcgtgttgaattacctgaaacaggaatgatgacgcttgtcattgaattttcaggtagcattacagataatatgacaggtatttacccttcatattacactaaaaatggtgagaaaaaagaagtcatttcaactcagtttgaaagccattttgcacgtgaagctttcccatgtatcgatgaaccacaagcaaaagctacttttgatttaagcttgacctttgatcaagaaattggtgagatagcgttatcgaatatgccagaagtcaatattgaccgtcgcgaggagactggtctttggacatttgatacgacactaagaatgtcatcttacttgctagcgtttgcgctaggagaacttcatggaaagactgtagaaagcaaaaaaggaacaactgttggtgtgtatgcgacaacagcgcatcctcttagctcgcttgatttttcattggatattgcagttcgtgttatcaacttttatgaagactattttggagtacattacccaatcccgcaatctcttaatattgcgcttccagatttttcatctggtgctatggaaaattggggtttaatcacttatcgtgaaatttatttattagtagatgaaaattcgactgttcaaagccgacaacaagttgcacttgtaatcgcccacgagatagcacaccaatggtttggaaacttggttacaatgaaatggtgggacgatctgtggttaaatgagagttttgccaacatgatggaatatgtctctatcgaggctattgagccgtcttggaaaataatagaagatttccaaacaggcggtattcctcttgctttaaaacgtgatgctactgatggtgttcaatcagtgcatgttgaagtcaatcatccagatgagataaatacattgtttgatcctgctattgtctatgcaaaaggtagtcgtttgatgcatatgttacgccgttttattggtgatcgtgattttgccattggcttacatcactactttgaaaaatatcaatatcgaaatactgtcgggcgtgatttatggaatattttatcagatacttcaggcaaagacgtagctgcttttatggatgcttggcttgaacaaccaggttatccagttttaacagctcgccttgaaaacgatcaattgattttgagtcaaaaacaattttttattggaaaaggtgaagaaaaaggtcgcctttggccgattcctttaaacactaattggcatggccttcctgaaactttgacagaggcagaaatggtcattccaaactttagtcaattggcagcagaaaatgaaggagctctacgtttcaatattgataatacagctcattacattacagactaccaaggatcattattagatgccttagtcactgaacttgcccaacttgataatacttctgctttacaagttattcaagaacgtcgtttattggcagatagtggcttgatttcctatgctgaattggttgacttaattgctcaattggacgattctaagtcttatatggtagcagaagcggttcaacaagtggtctctggtttgaaacgcttcattgatgaaggaagcttagcagaaaaatcctttaatcgcttggtaaccaccatctatcaagaagactttaatcagcatggttttgagaaaaaagctgacgaatcagatgaagatgagatggtacgtcaggttgccttgggccgcttgtggctagcagaaaatcagacgattattgacggattgagaactatttttgaagcatatcaaaacaatattgcaagtattccagcagctgttcgtcgcttggttttagccaaccaaatgaaatattttgaaacagatagcttggttgatatttattttgagacttatgtagcaactactgataataatttacgcagtgatttaacggttgcttttagtcaaacaaaacaaccaactactattagacgtattcttgttagtttaaaagataaagatattattaaacctcaggatttatcttattggtacaatgctttgcttggacaaagctttactcaagatatcatttgggaatgggctagagaaaattgggattggattaaatctgcacttggtggagatatgagctttgataaatttgttatttatccagcaagtaactttaaaacaccaaaacatctagcagaatataaatctttctttgaacctaagctagatgatatggctattagccgtaatattaccatgggaattaatgaaattgaagcacgtgttgctttgattactaaagaaaaagaagcagttattgcagctctcagtcattactag

SEQ ID NO: 1090 - protein, 845 aa, Streptococcus pyogenes
MKTVEHLIETFVPENYNIFLDINRQTKTFTGNVAINGEALDNHVAFHQKDLDIKSILLDNEAVIYQVDNDNEVVRVELPETGMMTLVIEFSGSITDNMTGIYPSYYTKNGEKKEVISTQFESHFAREAFPCIDEPQAKATFDLSLTFDQEIGEIALSNMPEVNIDRREETGLWTFDTTLRMSSYLLAFALGELHGKTVESKKGTTVGVYATTAHPLSSLDFSLDIAVRVINFYEDYFGVHYPIPQSLNIALPDFSSGAMENWGLITYREIYLLVDENSTVQSRQQVALVIAHEIAHQWFGNLVTMKWWDDLWLNESFANMMEYVSIEAIEPSWKIIEDFQTGGIPLALKRDATDGVQSVHVEVNHPDEINTLFDPAIVYAKGSRLMHMLRRFIGDRDFAIGLHHYFEKYQYRNTVGRDLWNILSDTSGKDVAAFMDAWLEQPGYPVLTARLENDQLILSQKQFFIGKGEEKGRLWPIPLNTNWHGLPETLTEAEMVIPNFSQLAAENEGALRFNIDNTAHYITDYQGSLLDALVTELAQLDNTSALQVIQERRLLADSGLISYAELVDLIAQLDDSKSYMVAEAVQQVVSGLKRFIDEGSLAEKSFNRLVTTIYQEDFNQHGFEKKADESDEDEMVRQVALGRLWLAENQTIIDGLRTIFEAYQNNIASIPAAVRRLVLANQMKYFETDSLVDIYFETYVATTDNNLRSDLTVAFSQTKQPTTIRRILVSLKDKDIIKPQDLSYWYNALLGQSFTQDIIWEWARENWDWIKSALGGDMSFDKFVIYPASNFKTPKHLAEYKSFFEPKLDDMAISRNITMGINEIEARVALITKEKEAVIAALSHY

SEQ ID NO: 1091 - DNA, 279 bp, Streptococcus pyogenes
atgtcaggtaattattattatccacttgacttaagttggagcactgaagaaatatcctcagtgcttcattttttgaataaagtggaattagcatatgaaaaaaaagtagatgcaaaacaactcctagatagttataagacttataaaaccattgtcaaaagtaaagctcaggaaaagcaaatcgatcgtgattttcaaaaagttagtggttattcgacctatcaagttgttaaaaaagcgaaggcaattgagaaaggattcttttcccttggaaactaa

SEQ ID NO: 1092 - protein, 92 aa, Streptococcus pyogenes
MSGNYYYPLDLSWSTEEISSVLHFLNKVELAYEKKVDAKQLLDSYKTYKTIVKSKAQEKQIDRDFQKVSGYSTYQVVKKAKAIEKGFFSLGN

SEQ ID NO: 1093 - DNA, 702 bp, Streptococcus pyogenes
atggcttttattgaattaaaacaggtttcaaaatcttatcagataggagagacgactgtttttgccaaccacgaagtgtcttttgagattaataaaggagaactagtggttattttgggagcatccggagctggtaaatcgacagtcctcaatattttggggggcatggacacagtagatgcaggtcaagtaattattgatggcaaagacattgctcattacacgtctaaggccttaactcagtatcgtcggaatgctattggtttcgtttttcaattttataatttggttcctaatttgacagctaaagaaaatgttgaattagcagttgaaattgtagcagatgctttagatcctgtgaccattttaaaggaagtaggactcagtcatcgtctggatcattttcctgctcagctctcaggtggtgaacagcaacgggtttcgatagcacgtgccttagctaaaaaccctaaattgcttctttgtgatgaacctacaggtgcccttgactaccaaacaggaaagcaaattctaaccctcttacaggatatggcacaaactaaggggaccacggtagttattgtaacccacaatgctgctattgctccgatagctgatcgtgtcatttttatgcatgatgcacaggttaccaagacagtcattaataaggaacctgcaagcattgagacaattgattattaa

SEQ ID NO: 1094 - protein, 233 aa, Streptococcus pyogenes
MAFIELKQVSKSYQIGETTVFANHEVSFEINKGELVVILGASGAGKSTVLNILGGMDTVDAGQVIIDGKDIAHYTSKALTQYRRNAIGFVFQFYNLVPNLTAKENVELAVEIVADALDPVTILKEVGLSHRLDHFPAQLSGGEQQRVSIARALAKNPKLLLCDEPTGALDYQTGKQILTLLQDMAQTKGTTVVIVTHNAAIAPIADRVIFMHDAQVTKTVINKEPASIETIDY

SEQ ID NO: 1095 - DNA, 1020 bp, Streptococcus pyogenes
atggtaacaataaaagatgtcgctcaaaaggcaggtgttaacccttcgacggtgagtagggtattaaaagataatcgatctatttctatgaagacaaaagagaaggttagaaaagcgatggcagatttgggatatgttccaaatgtcgcagcacagattctagcgagtggtttgacacacaatataggacttgtttttcctcctattacaactagcgatagattaagtgaacctttctttatggaaattttgtcgactattactaacgaagctaaagaatctcattttactgtgtcgattgctacaggtatatctcttgatgacctgatagagcaagtgaaactgatgcatcttcaaaaacgagttgatggttttattattctttattctgatcaagatgatcctgtcaaaaaatatttgatgacaaataacttaccatttgtcattgtaggtgctccacaaggtgacactaataaaaccacttatattgataatgataatcagctaatggctaaaacagcagtagaacacctttatcaaaaaggccatcacaacatattatttataacagatgatttactatcagaagtaacttctgagcgttatcttggctatttgaagggttgttttaagcgatctttaaaaacaaagccaatgctgttatttgatcgtaaggatcctgttagcgtagaaatattgatggaaactatatcttcctttaaagcaactgccttggttgttgttggtgatgttctggctattcgtatggtacagttattatctttttatgatataaaagtgccagatgatatgtcaattatcacttttaataattctaattacgctaaattaattcacccttatttaacgacatttgatataaatgttgaaaatcttggaaaaatgtcttttaagcaattacttgatattatcaattccaatgaacagaatcttagtcagactatttttgttccttttagtttaaaacaaagagaaagcgtccgtgatattagtcattaa

SEQ ID NO: 1096 - protein, 339 aa, Streptococcus pyogenes
MVTIKDVAQKAGVNPSTVSRVLKDNRSISMKTKEKVRKAMADLGYVPNVAAQILASGLTHNIGLVFPPITTSDRLSEPFFMEILSTITNEAKESHFTVSIATGISLDDLIEQVKLMHLQKRVDGFIILYSDQDDPVKKYLMTNNLPFVIVGAPQGDTNKTTYIDNDNQLMAKTAVEHLYQKGHHNILFITDDLLSEVTSERYLGYLKGCFKRSLKTKPMLLFDRKDPVSVEILMETISSFKATALVVVGDVLAIRMVQLLSFYDIKVPDDMSIITFNNSNYAKLIHPYLTTFDINVENLGKMSFKQLLDIINSNEQNLSQTIFVPFSLKQRESVRDISH

SEQ ID NO: 1097 - DNA, 1704 bp, Streptococcus pyogenes
atgaatgttgccggaatgctccatattcctgattcgaggtattgctttgccatatctcaaaaggaacttgtcatccgattacgcgtggccaaagaagatagaggtattactgttaatttggtccacgggcctaaatatggttatcatgaattccaagaagaattggaaatgtcagttgcctatacagaccatacgcatgcttattatgaaactactttaacattagacgatgtgaggttggcctacatttttaaaattgaagaagaaggtcaaacctattattttagtgaagatgggttaactactagttacgatttttcaaatgggttttataatttcttccaaatgccttatatcaatgctgttgatgttcatcaagtcattccttggacaaaagacgcggttttttatcaaatctttgttgatcgctttaaccgtggggattgggaaaaaggtgacagttatgtcaacatgggttggttagaaaaaccgactcctaaaagttttgctggtggagatttaaagggaattacagaaaaattagattacctcaaagatttagggattactgtcatctatttaacgccaatttttcaatccattagtaatcacaaatatgatattagtgattactacgctattgatccacaatttggaactaaatatgatttgcaagaattgattgatttagctcacaaaatgggaatcaagattattctagacgctgtctttaaccatgccagcagtgatgccgtggaatttcaggatgtcttgagatacggtaaagagtctaagttttttgattggtttatgactcatgatgaacacccatccatggacctagtaaactatgaaacctttgctggatgtaactatatgcccaaatggaatacctcaaatagagacgtgcaagactatctgattgagattgggcgatactggattaaagaattttgtatcgatggttggcgcctagatgtttctgatgaagtatctcatgatttttggcgacgtttccgtcaggcggttaaagcggaaaaagcagatgccattttaattggggagaactggcatgatgcctatccttatttggcaggggatcagtatgatgggataatgaattatgctttcaccaaagcctgtttggattactttgcttttgaaaccatgacatcaaaacaattggctgagaaattaagcaacattttgatgcgaaacacttggcaagtcaatcgcatgaacttgaatcttttggattctcatgatacgcatcgtttcttcactcaagttaagggttccaaagataaattgttagctgctttagcattgctctttatctttatgggcattccttgcttgtattatgggacagaagtggcaatggaagggggttacgaccctgattcgcgtcgcggttttccttgggatgatgctgagcgggacaaggatttctttagcaaagtaaaagcgattattgctcttcgccaacagccagctcttcaagaaggagctattagcattgattatgacgaagactgcctcattctgaaacgcagcttaggtgagcaaagcatttcacttgttcttaacaatggtgagagtgcttattctattaaggaaggaggacagattttgacaagcaatggggtaactaaaaacaaaaaacaattactccaggatggatatattgtgtttagtaactaa

SEQ ID NO: 1098 - protein, 567 aa, Streptococcus pyogenes
MNVAGMLHIPDSRYCFAISQKELVIRLRVAKEDRGITVNLVHGPKYGYHEFQEELEMSVAYTDHTHAYYETTLTLDDVRLAYIFKIEEEGQTYYFSEDGLTTSYDFSNGFYNFFQMPYINAVDVHQVIPWTKDAVFYQIFVDRFNRGDWEKGDSYVNMGWLEKPTPKSFAGGDLKGITEKLDYLKDLGITVIYLTPIFQSISNHKYDISDYYAIDPQFGTKYDLQELIDLAHKMGIKIILDAVFNHASSDAVEFQDVLRYGKESKFFDWFMTHDEHPSMDLVNYETFAGCNYMPKWNTSNRDVQDYLIEIGRYWIKEFCIDGWRLDVSDEVSHDFWRRFRQAVKAEKADAILIGENWHDAYPYLAGDQYDGIMNYAFTKACLDYFAFETMTSKQLAEKLSNILMRNTWQVNRMNLNLLDSHDTHRFFTQVKGSKDKLLAALALLFIFMGIPCLYYGTEVAMEGGYDPDSRRGFPWDDAERDKDFFSKVKAIIALRQQPALQEGAISIDYDEDCLILKRSLGEQSISLVLNNGESAYSIKEGGQILTSNGVTKNKKQLLQDGYIVFSN

SEQ ID NO: 1099 - DNA, 1401 bp, Streptococcus pyogenes
atgaaacaaagaaaacaccgttatcaatttccagatggctttttatggggaagttccacatctgggcctcaaagcgaaggaacggttcctggagatggcaaaggacctagcaactgggattactggtttagtattgagtcagctaagtttcatcaccaaattggtccagaaaaaacctcaaccttttatgaaaactataagggtgacattgcccttttgaaagaaacaggccacacgatttttcggacctcaatccagtggtctcgattgattccagaaggagtcggggaggttaatccaaaggcggtgacattttaccgagaagtatttcaagacattattgctcaaggtattaaattgattgttaacctctatcattttgacctcccctatgccttgcaagaaaaaggtggctgggaaaacaaagctactgtctgggcttatgaaacctacgcaaaaacctgttttgagctttttggtgatttagtaaacacttggattacctttaatgaaccgattgttccagtcgaatgtggctatttaggttattatcactacccttgtaaagtagatgccaaggcagcagttcaagtggcttacaacacacaactggccagttcactggcggtcaaagcttgtcataagcttcatcccgaccacaagattagtattgtgcttaacatgacacctgcttatcctcggagtaatgctcctgaagatgtcaaggctgctagaatcgcagagcttttccaaaccaaatccttcctagatccatcagttttgggtgtttacccagcagagttagtttccattttagaggaagctgatttattacctcaatatagtgctgatgaattagagattatcaaaaacaatactgttgattttttgggagttaattattatcagcctttgcgggttcaggcacctagtaagtcacagcaagagggggacctccttatcttagatatttattttgaaccttatgatatgcctggtaaaaaagtcaatcctcaccggggttgggaaatttatgaaccaggactttatgatattgcccttaatttaaaagaacactatggtaacatcgaatggctagtcacggaaaatggtatgggtgtcgaaggtgaagaagcttttttagcagatggccagatacaagatgactaccgcatcacctttatcgaggatcatcttatccagcttcataaggctttgggagaaggagccaactgcaaaggctacctcttgtggacttttattgattgctggtcttggttaaatgcttataaaaaccgatatggtttggtagctttggatttagagagtcaaaagcgaaccataaaaaaatcaggttactggtttaaggcgttgagcgagtcaaatggttttgataaatag

SEQ ID NO: 1100 - protein, 466 aa, Streptococcus pyogenes
MKQRKHRYQFPDGFLWGSSTSGPQSEGTVPGDGKGPSNWDYWFSIESAKFHHQIGPEKTSTFYENYKGDIALLKETGHTIFRTSIQWSRLIPEGVGEVNPKAVTFYREVFQDIIAQGIKLIVNLYHFDLPYALQEKGGWENKATVWAYETYAKTCFELFGDLVNTWITFNEPIVPVECGYLGYYHYPCKVDAKAAVQVAYNTQLASSLAVKACHKLHPDHKISIVLNMTPAYPRSNAPEDVKAARIAELFQTKSFLDPSVLGVYPAELVSILEEADLLPQYSADELEIIKNNTVDFLGVNYYQPLRVQAPSKSQQEGDLLILDIYFEPYDMPGKKVNPHRGWEIYEPGLYDIALNLKEHYGNIEWLVTENGMGVEGEEAFLADGQIQDDYRITFIEDHLIQLHKALGEGANCKGYLLWTFIDCWSWLNAYKNRYGLVALDLESQKRTIKKSGYWFKALSESNGFDK

SEQ ID NO: 1101 - DNA, 498 bp, Streptococcus pyogenes
atggcttatttaaactactttacaaaaaccgagtgggcactttggttaagctctgtcttggccattttaattagcgcccttttattcggtaagcaagctcccttagctttaatagcttctttgattggtgtgacctctctcatttttagtgctaaagctaatcctattggtcaagggctcgtcattattttttccattatctatgcctatctttcattacgaaacagttactatggagagttaatgacctatctttttatgaccctccctatgactattttttcactttttacttggttaaaccatccttttgaagggaaaaaatcacaagtgactatttcacgattaacacccactgatcgaagatgtcttttcgtttttactatactgatcactcttattttctacagcatcttggcttctatttcaaacagcctatttacttgtctccactttatcgattgccacttctttctcagcggtttatctcagctataa

SEQ ID NO: 1102 - protein, 165 aa, Streptococcus pyogenes
MAYLNYFTKTEWALWLSSVLAILISALLFGKQAPLALIASLIGVTSLIFSAKANPIGQGLVIIFSIIYAYLSLRNSYYGELMTYLFMTLPMTIFSLFTWLNHPFEGKKSQVTISRLTPTDRRCLFVFTILITLIFYSILASISNSLFTCLHFIDCHFFLSGLSQL

SEQ ID NO: 1103 - DNA, 159 bp, Streptococcus pyogenes
atgggtgataaaccgatatcctttaaggataaggatggaaattttgtatcggcagcagatgtttggaatgctgagaaattagaagaattgtttaatcttttaaatcccaatagacgtttgcgcttagaacgtgaaaaattgaaaaaggatgaggcttag

SEQ ID NO: 1104 - protein, 52 aa, Streptococcus pyogenes
MGDKPISFKDKDGNFVSAADVWNAEKLEELFNLLNPNRRLRLEREKLKKDEA

SEQ ID NO: 1105 - DNA, 1284 bp, Streptococcus pyogenes
atgagcaaacatcaagatattttagattatttagaaaaacttgctattggtaaaaaagtgagtgttagaagcatttcaaaccacttaaaagtaagcgatggaacagcctaccgtgctattaaagaggcagaaaatcgaggtattgtcgaaaccaaaccaagaagtggaactgttcgtattgaaaaaaaaggacgggttcgtattgaccgtctgacctattccgaaattgctcggatcagtgattcggaagtgctagcgggacatgctggtttaggacatgaatttagtaggttttcaattggtgctatgactcaacaaaatattcgtcgttacttggtcaaaggagggttattaatagttggggatcgtgaaacgattcaactcttagctcttgaaaaccataatgccattttggtgacgggcggatttccagtatccaaacgtgttattgaaatggcaaataaccaacgaatcccagttatggtaactcattatgatacctttactgtggcaacaatgattaatcacgcgctatctaatattcgtattaaaacagatctcaaaacagttgaacaggtaatgatacctattacagattatggttacctttgcgaagacagctctgttgaagaattcaatacattaataaaaaaaacacgacaagtcaggtttcctgtattagattataaaagaaaagtgattggtgtagttagtatgcgtgatgtggtggatcagttgccaacaactaagcttaccaaggtcatgtctaaaaatccaataacggctagaccaaatactagtcttgctaatattagccagaaaatgatctttgaagatttaaacatgttacctgtcactgacgaagaaaacaatttacttggtatgattactcgtagacaagcaatggaaaatttgccaaatcaccaaccaaataacccctatacttatagtgagcaaatactttctaaccttgaagaaacggttgattattatcaagtagtagttgagccaacaatgattgatagtgctggtaacatgtcaaacggtgttatttcagagttcttaaaggaaattagtatcagagccctcacgaaaaagcaccaaaaaaatatcattatcgaacaaatgatggtatactttttacatgctattcaaattgaggatgaattaaaaatatatcctaaaatcattactgaaaatagacgaagcagcaccattgatattgaaatttttgtggatgatcaagtgattgctaaagctattattacaacgaaaataaattag

SEQ ID NO: 1106 - protein, 427 aa, Streptococcus pyogenes
MSKHQDILDYLEKLAIGKKVSVRSISNHLKVSDGTAYRAIKEAENRGIVETKPRSGTVRIEKKGRVRIDRLTYSEIARISDSEVLAGHAGLGHEFSRFSIGAMTQQNIRRYLVKGGLLIVGDRETIQLLALENHNAILVTGGFPVSKRVIEMANNQRIPVMVTHYDTFTVATMINHALSNIRIKTDLKTVEQVMIPITDYGYLCEDSSVEEFNTLIKKTRQVRFPVLDYKRKVIGVVSMRDVVDQLPTTKLTKVMSKNPITARPNTSLANISQKMIFEDLNMLPVTDEENNLLGMITRRQAMENLPNHQPNNPYTYSEQILSNLEETVDYYQVVVEPTMIDSAGNMSNGVISEFLKEISIRALTKKHQKNIIIEQMMVYFLHAIQIEDELKIYPKIITENRRSSTIDIEIFVDDQVIAKAIITTKIN

SEQ ID NO: 1107 - DNA, 1086 bp, Streptococcus pyogenes
atgatcactaaatttccccctcaatggcaagaaaaacttgaccaagttgcatttacccatttaacgccaatccaagaacaggcctttcaacctattgttgatggtaaaaatttccttggtattagccctactgggacgggcaagaccttagcttatgtctttcctaatctattggcactgacgcctaaaaagtcccaacaactactcattttagcccctaataccgaattagctggccaaatttttgaagtcacaaaggattgggcacagccactaggcttaacggcacaactctttatttctggaaccagtcaaaaacgtcaaatcgaacgcctcaaaaaaggtcctgaaatcctgattggaacccctggacgcatttttgagctgattaaattgaaaaaaatcaagatgatgtctgtcaacaccattgttttagatgaatatgacgaactattaggtgattcccaatatgattttgttcaaaaaattagccactatgttcctcgagatcatcaaatggtatacatgagtgctactaataaggtggatcaaacttccttagctccaaatacattctgcatcgatctttcagagcaaaccaacgatgctattcagcatttttacctcatggttgacaagcgcgaacgtacagatttattacgaaaatttactaatattcctcattttagagctttggtctttttcaacagtttatctgatttgggtgctacggaagaacgtctccaatataatggagctgctgcggtttccttagcgagtgacattaatgtcaaattccgtaaaaccattctcgaaaaattcaaatcccaccaactctccttattgttagctacggatcttgttgctcggggcattgatattgataatcttgactatgtcattcattttgatgttgctcgtgataaggaaaattacactcacagagctggacgaaccggccgtatgggaaaatctggtatcgttattacctttgttagccaccctgaagacctcaaaaaattgaaaaaatttgctaaagtctctgaaatctccctcaaaaatcaacaacttcatttcatcaactag

SEQ ID NO: 1108 - protein, 361 aa, Streptococcus pyogenes
MITKFPPQWQEKLDQVAFTHLTPIQEQAFQPIVDGKNFLGISPTGTGKTLAYVFPNLLALTPKKSQQLLILAPNTELAGQIFEVTKDWAQPLGLTAQLFISGTSQKRQIERLKKGPEILIGTPGRIFELIKLKKIKMMSVNTIVLDEYDELLGDSQYDFVQKISHYVPRDHQMVYMSATNKVDQTSLAPNTFCIDLSEQTNDAIQHFYLMVDKRERTDLLRKFTNIPHFRALVFFNSLSDLGATEERLQYNGAAAVSLASDINVKFRKTILEKFKSHQLSLLLATDLVARGIDIDNLDYVIHFDVARDKENYTHRAGRTGRMGKSGIVITFVSHPEDLKKLKKFAKVSEISLKNQQLHFIN

SEQ ID NO: 1109 - DNA, 219 bp, Streptococcus pyogenes
atgattacagtatattccaaaaataattgcatgcagtgcaaaatgactaagaaatttttagaacaacacggagtcaacttccaggaaattaatatcgatgaacatcctgaaaaagtggattatgtgaaaagtcttggcttcacatctgctcctgttatcgaagcagataacctcgtattttctggcttccaacctgcaaagttaaaagaattgatttaa

SEQ ID NO: 1110 - protein, 72 aa, Streptococcus pyogenes
MITVYSKNNCMQCKMTKKFLEQHGVNFQEINIDEHPEKVDYVKSLGFTSAPVIEADNLVFSGFQPAKLKELI

SEQ ID NO: 1111 - DNA, 216 bp, Streptococcus pyogenes
atggaggttattcttaaaaatcggctcaaagaattacgagctagagatggaattaatcaaacggaaatggctaaactggcaggagtatcgaggcagaccatcagtctcattgagcgtaacgagtacaccccatcagttataattgccatgaaaattgcaaaggtatttcaggaaccagttgaagaggtgtttcgtctagtggaggtcgaggaatga

SEQ ID NO: 1112 - protein, 71 aa, Streptococcus pyogenes
MEVILKNRLKELRARDGINQTEMAKLAGVSRQTISLIERNEYTPSVIIAMKIAKVFQEPVEEVFRLVEVEE

SEQ ID NO: 1113 - DNA, 780 bp, Streptococcus pyogenes
atgaaaacaccagaacagattttagaagcaactattcatattggggaacataaggttaccaaaacttttttggctaaatctatcttaggctttattggtggagcgatgattagccttggttatttactatacgtgagaattgccgccagtggtttagaaacttttggtgctttttccagtatcgtaggagcttgtgcttttccgattggtctaattattattttaatggcgggtggagaattaattacagggaacatgatggctgtttctgcagctttgttggccaaaaaaattaagtttagcgagcttgccaagaattggcttatcattaccttgtttaatgtgattggagctgtttttgtagcttttgtgtttggtcattttctaggcttaacatcagctggtatttttaaagaagaagtgattgaggtggcccatgctaaaatagcagcgagccctttgcaggcactagtatcaggaattggttgtaactggtttgttggtttggccttgtggctatgctatggggcaaatgatgctgctggtaaattccttggtacttggtttcctgtcatgacctttgtagcccttggttttcagcatagtgtagcaaatgcttttgtcattcctgctgctatttttgaaggaggagcaacatggttggattttgtcactaattttatttttgtctatagtggtaatattatcggtggagccatttttgttagttttttatattttaaagtttactatcatccgcaaaagagtaaaactcaatga

SEQ ID NO: 1114 - protein, 259 aa, Streptococcus pyogenes
MKTPEQILEATIHIGEHKVTKTFLAKSILGFIGGAMISLGYLLYVRIAASGLETFGAFSSIVGACAFPIGLIIILMAGGELITGNMMAVSAALLAKKIKFSELAKNWLIITLFNVIGAVFVAFVFGHFLGLTSAGIFKEEVIEVAHAKIAASPLQALVSGIGCNWFVGLALWLCYGANDAAGKFLGTWFPVMTFVALGFQHSVANAFVIPAAIFEGGATWLDFVTNFIFVYSGNIIGGAIFVSFLYFKVYYHPQKSKTQ

SEQ ID NO: 1115 - DNA, 936 bp, Streptococcus pyogenes
atggtttctactgctacacaaattggtcatttctcttttgataactgtttgatgaatgctgctggtgtttactgcatgacaaaagaagagcttatggaggttgaaaagtctcaagccgcttcctttgtcaccaaaacagggacgcttgaagttcgtccaggtaatccagaacctcgctacgcagatactcgtcttggttctatcaattcaatgggactccctaataatggttttcgctactacttagactttgtcagtgatcttgccaaaaccgggcaacataaacctcactttctctccgttgtcgggctatctcctactgaaaccgaaaccattttaaaagccatcatggcttcagattatgagggtctagtggaactaaacctttcttgccctaacgttccaggaaaaccacagattgcttatgattttgaaaccactgatcaacttctagagaacatctttacctattacactaaacctcttggtatcaaattacctccttattttgacattgtgcattttgatcaagcggctgcgattttcaataaataccccctttcctttgttaactgtgtcaattctatcggaaatgggctggtcattaaggatgaacaagtcctcatcaagcctaaaaatggctttggtggtataggtggagattacatcaaacctactgctctagccaatgtccatgcgttttacaaacgcttaaaaccttctatccacattattggtacagggggagttaaaacaggacgcgatgcctttgaacatattctttgtggcgccagcatggtccaaattgggacagcccttcatcaagaagggccagctatctttgaacgggtcactaaggaacttaaaacgattatggtagaaaaaggctaccaaagcttagacgattttcgtgggaacttacgttacaaagattaa

SEQ ID NO: 1116 - protein, 311 aa, Streptococcus pyogenes
MVSTATQIGHFSFDNCLMNAAGVYCMTKEELMEVEKSQAASFVTKTGTLEVRPGNPEPRYADTRLGSINSMGLPNNGFRYYLDFVSDLAKTGQHKPHFLSVVGLSPTETETILKAIMASDYEGLVELNLSCPNVPGKPQIAYDFETTDQLLENIFTYYTKPLGIKLPPYFDIVHFDQAAAIFNKYPLSFVNCVNSIGNGLVIKDEQVLIKPKNGFGGIGGDYIKPTALANVHAFYKRLKPSIHIIGTGGVKTGRDAFEHILCGASMVQIGTALHQEGPAIFERVTKELKTIMVEKGYQSLDDFRGNLRYKD

SEQ ID NO: 1117 - DNA, 486 bp, Streptococcus pyogenes
atgattgaatcgagtaatatgtatagtagattgaaaaaaaagggtgattttatgaaaaggtccaaaaaagcatcgttacttagtgttattgttggaatggctttagctgtgataccaatttatattgttaattatgacaatgaacttatcgttcttttaatgagtattttttttaatgggataattgtttccgcttttgaacttattaaaacatatgatggtttgcaggaagaatataaaaagctaactgtagatagatggaagaatactattttactggctttcaattcattatattttgcttctattttgacaaatagtctatcaaataatttatcaaccattttatcaactaatcgttctgacaaagtaagtgcaatatttcttacaggttgttctattttagcactacttccattcctccttcataggttaataaaacgagaaatagaaattgaaaatgaaagaaaaaaattaaaaaaataa

SEQ ID NO: 1118 - protein, 161 aa, Streptococcus pyogenes
MIESSNMYSRLKKKGDFMKRSKKASLLSVIVGMALAVIPIYIVNYDNELIVLLMSIFFNGIIVSAFELIKTYDGLQEEYKKLTVDRWKNTILLAFNSLYFASILTNSLSNNLSTILSTNRSDKVSAIFLTGCSILALLPFLLHRLIKREIEIENERKKLKK

SEQ ID NO: 1119 - DNA, 594 bp, Streptococcus pyogenes
atgaataagaatgatactaaaaatgtaacatctgcaaagcccaagaccggtggggcgatttattcggcaccgcttggtactgaattgcccaaggatgcaaaatcagaattaaatactaaatttaagaatttgggttatgtatccgaggatggtgtggtcaatgaagatacacgttcatccgaaaatattaaagcgtggggtggagatattgtcggggctgtacagacagaaaaagaggataaatttacttataagctgattgagtcactaaatgtagaagtcttaaaagaagtttatggcgctgtcaatgttactggagatttaagtgggggaatccagattaaatcaaattcaaaagagttagaagctcacgtaattgttgttgacatgatcatgaatggcggcattcttaaacgaattgtcttaccaaatgcaaaagtcgatgaggtaggtgaaattaagtatgttgacggcgaagtcgttggttatgaaacaacactaaaatgtttcccggacaaggatggtgatacacaccgtgagtatattgtaaaacctggagaagctaataaaaaagaaaacagctttgaaatgtaa

SEQ ID NO: 1120 - protein, 197 aa, Streptococcus pyogenes
MNKNDTKNVTSAKPKTGGAIYSAPLGTELPKDAKSELNTKFKNLGYVSEDGVVNEDTRSSENIKAWGGDIVGAVQTEKEDKFTYKLIESLNVEVLKEVYGAVNVTGDLSGGIQIKSNSKELEAHVIVVDMIMNGGILKRIVLPNAKVDEVGEIKYVDGEVVGYETTLKCFPDKDGDTHREYIVKPGEANKKENSFEM

SEQ ID NO: 1121 - DNA, 1416 bp, Streptococcus pyogenes
atggttactaagacgaaaacaaagcttggcaatcagcgacctactcaatcggtaaatttacattttgctaaatctctagcgcatgaagctattaattactacaaaaaaacagggctaagctgctatccatggcaagtaaatatgcttatcccaattatggccatagatgaaaatggtctgtgggttcatcaaaagtatgggtatgctatcccacggcgtaacggtaagacggaagtagtctatattgttcagctgtgggctttgcataaaggtttaaaaatcttgcatacagctcatcgaattagcacatctcatgcatcattcgaaaaggtaaaaaaataccttgagatgtcaggttatgttgatggagaagactttatatcaaataaagccaagggtcaagagcgtatagagttcaaagccagcggcgctgttatccagttccgaactaggacatcaaacggtggacttggtgagggatttgacttacttatcattgacgaggcacaagaatacacatctgagcaagaatcagcattgaagtacacagttactgatagtgataatccaatgactattatgtgtggaacgccgccaacgatggtatctactggtacagtatttgaagcatatcggaaagattgcttaaaaggcaataagcgttattctggttgggctgaatggtcagttcctgagatggttaagattaacgatgtatcttcctggtatatttccaacccatctatgggattccacctcaacgagaggaaaatcgaagctgaattaggtgaagatgagattgatcacaacatccaacgcttaggttattggccatcctttaaccaaaaatcagttatatccgaaaaagaatgggcaaaactcaaagttgagcaagtgccagaactcaaaagcaagctttttgtcggtatcaagtttggtcaagatggcaacaacgtatcactatcaattgcagcaagaacatcagaaaataaggtatttgttgagactattgactgtttatcggtcagaaatggaactcaatggattattaattttttgaaatcggctgatatcgctaaggttgtcattgatggtgcaagtggtcaagaattacttgctcaggagatgaaagatcaaggtctaaagaaaccagaattgcctaaagttgctgaaattatcacagctaacatgatgtgggagcaggggatcatgcaggaaaccatttgtcatagtgatcagccatctttgacagcagtagtcacaaactgtgaaaagaggcaaattggctctaatggtggttttgggtataaatcgctttatgatgatagagacattagcttaatggacagtgcattgcttgcgcactggatttgttacacaacgaagccaaaaagaaagcaaagaaccagctgttaa

SEQ ID NO: 1122 - protein, 471 aa, Streptococcus pyogenes
MVTKTKTKLGNQRPTQSVNLHFAKSLAHEAINYYKKTGLSCYPWQVNMLIPIMAIDENGLWVHQKYGYAIPRRNGKTEVVYIVQLWALHKGLKILHTAHRISTSHASFEKVKKYLEMSGYVDGEDFISNKAKGQERIEFKASGAVIQFRTRTSNGGLGEGFDLLIIDEAQEYTSEQESALKYTVTDSDNPMTIMCGTPPTMVSTGTVFEAYRKDCLKGNKRYSGWAEWSVPEMVKINDVSSWYISNPSMGFHLNERKIEAELGEDEIDHNIQRLGYWPSFNQKSVISEKEWAKLKVEQVPELKSKLFVGIKFGQDGNNVSLSIAARTSENKVFVETIDCLSVRNGTQWIINFLKSADIAKVVIDGASGQELLAQEMKDQGLKKPELPKVAEIITANMMWEQGIMQETICHSDQPSLTAVVTNCEKRQIGSNGGFGYKSLYDDRDISLMDSALLAHWICYTTKPKRKQRTSC

SEQ ID NO: 1123 - DNA, 225 bp, Streptococcus pyogenes
atggaaccaaaattacatcggcaactgcgtcaaaaatatgacgacgctgaaaaacaatatcttgaaaagtttggagaagactcgcttgatagagtatttttttgggagccagacgtttactttgatgagtggaaaaaggttctaccagatgcaacactggaattaaacaaagctattaatagcggggtggcgattggtccagatccagaaaacgcaatatattaa

SEQ ID NO: 1124 - protein, 74 aa, Streptococcus pyogenes
MEPKLHRQLRQKYDDAEKQYLEKFGEDSLDRVFFWEPDVYFDEWKKVLPDATLELNKAINSGVAIGPDPENAIY

SEQ ID NO: 1125 - DNA, 756 bp, Streptococcus pyogenes
atggagcaattaggggaccgaataagaaagttgagagaagggcgcaacatgactcagactgaactttcagaaatattgggcatgaaaacctatactactgtttcaaagtgggagaagaatgaaaattttccaaaaggtaaagacctaaaaaaactagcagagattttcaacgttacctctgactatcttttaggactcacagatagtaaacttgggaaaatcacaatacagaacgaacaacctgaaatcgtttctatatacaaccaactagaacaacctagacaagaaaaagtcctcaacttcgctaacgaacaattagaagaacaaaataaaaccgtttctatattcgataaaaaatctgaggagacagaagattatatcactgactacgttgagggattggttgccgctggtcttggggcataccaagaagacaatttacacatgaaagttaaactacgttctgatgatgtccccgatgagtatgatactattgcaaaagtagctggcgattcaatggaaccacttattcaagacaacgatttgctattcatcaaggtatctagccaagtcgatatgaatgatatagggatattccaagtcaatggtaaaaactttgtaaaaaaactcaagcgtgattatgatggcgcttggtacttgcaaagtttaaataaaagctatgaggaaatctatctatcaaaggatgacgacatccgcacaatcggtgaagttgtggatatttatagggaatattaa

SEQ ID NO: 1126 - protein, 251 aa, Streptococcus pyogenes
MEQLGDRIRKLREGRNMTQTELSEILGMKTYTTVSKWEKNENFPKGKDLKKLAEIFNVTSDYLLGLTDSKLGKITIQNEQPEIVSIYNQLEQPRQEKVLNFANEQLEEQNKTVSIFDKKSEETEDYITDYVEGLVAAGLGAYQEDNLHMKVKLRSDDVPDEYDTIAKVAGDSMEPLIQDNDLLFIKVSSQVDMNDIGIFQVNGKNFVKKLKRDYDGAWYLQSLNKSYEEIYLSKDDDIRTIGEVVDIYREY

SEQ ID NO: 1127 - DNA, 840 bp, Streptococcus pyogenes
atgggaactataaaaattgttacagattcatcaataactattgaaccagaattaattaaagctttagatattactgtagtacctttatctgtcatgattgatagcaaattatattctgataatgatttaaaagaagaaggtcattttttgagccttatgaaggctagcaaatcccttcccaaaaccagtcagccaccggttggtctctttgctgaaacttacgaaaatttggtcaaaaaaggagtaactgacattgttgctattcacctctcaccagctttatcaggtactattgaagcttcccgtcagggggctgaaatcgctgaggcacctgttacagttttagattcaggatttactgatcaagccatgaaatttcaggtcgttgaggcagcaaagatggcaaaagcgggtgctagtttgaatgagattttggctgctgttcaagctatcaaatcaaaaacagagctctacattggtgtatctaccttagaaaatttagtaaaaggaggtcgtattggtcgtgtgacgggtgttttgagctcgctacttaatgtcaaagttgttatggcacttaaaaatgatgagttaaaaacgcttgtcaaaggtcgaggtaataaaacatttacgaaatggttagatagttacctcgctaaaaatagtcatcgcccgattgcagagatagctatttcttatgctggtgaagctagcctggcattaaccttaaaagaaagaatcgcagcttattacaaccactctatttcggttttagaaacaggctctatcatccaaacacatacaggagaaggagcttttgcggttatggttcgttatgaataa

SEQ ID NO: 1128 - protein, 279 aa, Streptococcus pyogenes
MGTIKIVTDSSITIEPELIKALDITVVPLSVMIDSKLYSDNDLKEEGHFLSLMKASKSLPKTSQPPVGLFAETYENLVKKGVTDIVAIHLSPALSGTIEASRQGAEIAEAPVTVLDSGFTDQAMKFQVVEAAKMAKAGASLNEILAAVQAIKSKTELYIGVSTLENLVKGGRIGRVTGVLSSLLNVKVVMALKNDELKTLVKGRGNKTFTKWLDSYLAKNSHRPIAEIAISYAGEASLALTLKERIAAYYNHSISVLETGSIIQTHTGEGAFAVMVRYE

SEQ ID NO: 1129 - DNA, 1662 bp, Streptococcus pyogenes
atgttattagaaatttctattaaaaattttgctattattgatgaaatttccctaaattttgaaaatggtatgacggttttgacgggtgaaactggagcaggaaagtctattatcattgatgctatgaatatgatgcttggtgcgcgtgctagtacagaagtgattcgtcgtggagctaataaagcagaaattgaggggttcttttcggtagatgctaccccagaactggttgcgtgtctggaatcatcaggtattgctatggaagaagaactgattattcgccgagatatctttgccaatggcagaagcgtgagccgcattaatggtcagatggttaacctagccaccttaaaacaggtcggacagtttttggtagatattcatgggcaacatgaccaagaagaattaatgcgaccacagctccaccagcaaattttggacgcttttggtgataaggcttttgagcaattgaaagagaattatcagcttatttttgatcgttataaaagcttgcgtcgccaggttattgacaaacaaaaaaatgaaaaggaacacaaagatcgtattgatatgttggcctttcagatagcagaaattgaagctgctgccttgagtcgaggtgaggacgaccggttaaatcaagaacgtgatcgcttaatgaaccacaaacaaattgctgataccctgaccaatgcctacgtcatgctagataatgacgatttttcaagtctatccaatattcgctctagcatgaatgacttactatcaattgagcagtttgattcagagtacaaagggatgtcgacttcgatttctgaagcctattatattcttgaagaagtgagcaagcaattatcagataccattgaccaactggattttgatggtgggcgattacaggaaattgaatttcgcttggatatactcaatagcttaactcgtaaatacggtggtaatgtgaatgatgtgcttgactactacgataatatcgtcaaagaataccagctattaacaggagatgacttgtcttcaggggatctagaggcagaattgaaaagcttggaaaaacaattggttgctgctgcttcggagttaagtgtctctcgccatcaattggcggagcaattagaagctgagattaaagctgaacttaaggaactttatatggaaaaagcagatttcaaagttcactttaccacatcaaaatttaatcgtgatggtaatgaaagcttggaattttacatctctactaatccaggcgaaggattcaagccccttgtcaaggtggcttctggaggagagttatcacgccttatgttagccatcaaggctgctatttctagaaaagaagataagacgagtattgtttttgatgaagtagatacaggtgtttctggtcgcgttgcgcaagccattgcccaaaaaatttataaaattgggcgacatgggcaagttctcgctatttcacacttacctcaagttattgctattgctgattatcagtattttatttctaaagaaagtaaagaagagtccaccgtttctaaggtaaggttattaactcctgaagaacgtgtggaagaaattgctagcatgattgcaggaacagatatgacacaagctgctcttacgcaggctcgtgaactacttgccaaacattaa

SEQ ID NO: 1130 - protein, 553 aa, Streptococcus pyogenes
MLLEISIKNFAIIDEISLNFENGMTVLTGETGAGKSIIIDAMNMMLGARASTEVIRRGANKAEIEGFFSVDATPELVACLESSGIAMEEELIIRRDIFANGRSVSRINGQMVNLATLKQVGQFLVDIHGQHDQEELMRPQLHQQILDAFGDKAFEQLKENYQLIFDRYKSLRRQVIDKQKNEKEHKDRIDMLAFQIAEIEAAALSRGEDDRLNQERDRLMNHKQIADTLTNAYVMLDNDDFSSLSNIRSSMNDLLSIEQFDSEYKGMSTSISEAYYILEEVSKQLSDTIDQLDFDGGRLQEIEFRLDILNSLTRKYGGNVNDVLDYYDNIVKEYQLLTGDDLSSGDLEAELKSLEKQLVAAASELSVSRHQLAEQLEAEIKAELKELYMEKADFKVHFTTSKFNRDGNESLEFYISTNPGEGFKPLVKVASGGELSRLMLAIKAAISRKEDKTSIVFDEVDTGVSGRVAQAIAQKIYKIGRHGQVLAISHLPQVIAIADYQYFISKESKEESTVSKVRLLTPEERVEEIASMIAGTDMTQAALTQARELLAKH

SEQ ID NO: 1131 - DNA, 471 bp, Streptococcus pyogenes
atgaaaaagagtgaacgacttgaattaatcaaaaaaatggttttgacgcatccaattgagacgcaacatgacctcttaagattattggcagagcatgggttagaattaacccaggctactatttcaagagacatgaatgaaattggtatagtaaagattccttctggcagtggacgttacatctatggtctttctcaagatagtggaaaaaagatcgttcaaggacctagatcgataaagagcactattttagctgtatctgacaaaacaaaaggtttagaacaacacctctatttaaaagtcgtacctggcaatagtaaattaatcaaacgttatttattagcagatttttcaaaagctatttttagtcttattgctgatgatgatagtttattgttaattgcaaagtctccttcagaagcagatatgatacgccaagaaattttgctttggatgcagggtataacctag

SEQ ID NO: 1132 - protein, 156 aa, Streptococcus pyogenes
MKKSERLELIKKMVLTHPIETQHDLLRLLAEHGLELTQATISRDMNEIGIVKIPSGSGRYIYGLSQDSGKKIVQGPRSIKSTILAVSDKTKGLEQHLYLKVVPGNSKLIKRYLLADFSKAIFSLIADDDSLLLIAKSPSEADMIRQEILLWMQGIT

SEQ ID NO: 1133 - DNA, 1341 bp, Streptococcus pyogenes
atggcagattatttaaccgtcactcatttgacgaaatatttaaaattaaaatttgaccgtgacccttatttggaacgggtttatctgactggtcaagtgtccaattttcgaaaacgaccaactcatcaatatttttccttaaaagatgaaagtgctgtgattcaagccaccatgtgggcaggagtctataaaaaactaggattcgacctagaagaaggcatgaaaattaatgtaattgggcgagtccaactttatgaacctagtggctcttactctatcgtgattgaaaaggcagagccagatggtataggtgccttggctttgcagtttgaacaattaaagaaaaaattaacggcagaaggttattttgagcaaaaacacaagcagcccttgccacagtttgtatcaaaaattggggtcattacaagtcctagtggtgctgtgattcgagatattatcacaaccgtttcacggcgttttccaggggttgagattttattattcccaactaaagtacaaggtgatggagccgcccaagaagtagtggctaatattcgaagagccaatcaaagagaggatttggacttgctcattgtcggccgtggaggtggctcgatagaagacctttgggccttcaacgaggaaatagtggttcaggctatctttgaatcgcaacttccagtgatttcgagtgtgggtcatgaaacagacacgactttagcggattttgtggcagatcgcagagcagccacaccaacagcagcagcagagttagcaacgcctattacaaaaacagatcttatgtcttggatagtagagcggcaaaatcgttcctatcaggcctgcttgaggcggattaagcaacggcaagagtgggtggataaactctcgcaatctgttatttttaggcaaccagaacgattatatgatgcctacctgcaaaaaattgatcgccttagcatgaccctgatgaatacgatgaaagatcgtctgagttccgccaaagaaaacaaggttcagttggaccatgccttggccaatagtcaattacagacaaaaatcgagcgataccaagaccgtgttgctaccgctaagcgtttactgatggctaatatggctagtcaatatgatagtcagctggctcgctttgaaaaagcacaggatgctttgctatcactggatgccagccgaattatcgcccgtggttatgcaatgattgaaaaaaatcaagcactggtagcctctgtaagtcagataacaaagggtgatcagttaaccattaagatgcgtgatggacaattagatgtagaggtaaaagatgtcaaaaacgaaaacatttga

SEQ ID NO: 1134 - protein, 446 aa, Streptococcus pyogenes
MADYLTVTHLTKYLKLKFDRDPYLERVYLTGQVSNFRKRPTHQYFSLKDESAVIQATMWAGVYKKLGFDLEEGMKINVIGRVQLYEPSGSYSIVIEKAEPDGIGALALQFEQLKKKLTAEGYFEQKHKQPLPQFVSKIGVITSPSGAVIRDIITTVSRRFPGVEILLFPTKVQGDGAAQEVVANIRRANQREDLDLLIVGRGGGSIEDLWAFNEEIVVQAIFESQLPVISSVGHETDTTLADFVADRRAATPTAAAELATPITKTDLMSWIVERQNRSYQACLRRIKQRQEWVDKLSQSVIFRQPERLYDAYLQKIDRLSMTLMNTMKDRLSSAKENKVQLDHALANSQLQTKIERYQDRVATAKRLLMANMASQYDSQLARFEKAQDALLSLDASRIIARGYAMIEKNQALVASVSQITKGDQLTIKMRDGQLDVEVKDVKNENI

SEQ ID NO: 1135 - DNA, 855 bp, Streptococcus pyogenes
atgacagaactaattgatggtaaagccttagctcaaaagatgcaacaagagttagcagctaaagtcaacaatctaaaacaaaaaaaaggaattgtaccaggcttagccgttattcttgtaggtgatgatcctgctagtcaggtgtatgtccgtaataaagagcgtgcagctcttactgtaggttttaaaagtgagaccgttagattatcagaattcatttgtcaagaagagcttattgcagtaatcgaacgttacaatgcagataacactattcatggtattttagtgcagctacccctgccaaatcatattaatgataaaaaaattattctcgccattgatcccaaaaaagatgtggatggttttcacccgatgaatacaggtcacctttggtcaggacgtcccttgatggttccttgtactccatcagggattatggaattgcttcgagaatataatgttaaccttgaaggtaaacatgccgtcattattggcagatcgaatatcgttggaaaaccaatggcacagctcttactggacaaaaatgcaacagtcacgttgacacattcaagaacacgtcaattagaagaagtatgtcgctgtgcagatgtgttgattgtggcaatcggacaaggtcatttcataacaaaacaatatataaaagatggtgcgatagtgattgatgtaggaatgaaccgtgatgataatggcaagctaattggagatgtggcctttgatgaggtggcagaagttgcagcgaaaatcacccctgtaccaggaggtgtcggtcctatgacgattgctatgttgctagagcaaacttatcaatctgctctccgtagtactcataaatag

SEQ ID NO: 1136 - protein, 284 aa, Streptococcus pyogenes
MTELIDGKALAQKMQQELAAKVNNLKQKKGIVPGLAVILVGDDPASQVYVRNKERAALTVGFKSETVRLSEFICQEELIAVIERYNADNTIHGILVQLPLPNHINDKKIILAIDPKKDVDGFHPMNTGHLWSGRPLMVPCTPSGIMELLREYNVNLEGKHAVIIGRSNIVGKPMAQLLLDKNATVTLTHSRTRQLEEVCRCADVLIVAIGQGHFITKQYIKDGAIVIDVGMNRDDNGKLIGDVAFDEVAEVAAKITPVPGGVGPMTIAMLLEQTYQSALRSTHK

SEQ ID NO: 1137 - DNA, 1695 bp, Streptococcus pyogenes
atgacttacaacgaggtatatcaagaatggttgcacaataatgatcttagtgatgatattaaagcagatttagcagccataaaagacaatgaggctgagattcaagatcgtttttacaaaacacttgaatttggaacagcagggctaagaggaaaacttggagcaggcaccaatcgcatgaatacctatatggttggtaaggcagcacaagctttagctaatactattattgatcatggacctgaagcggttaaaaagggcattgcggttagttatgatgttcgctatcaatctagaacatttgcagaattaacatgctctattatggcagctaacggtattaaggcgtacctttataaagggattcggccaacaccaatgtgttcgtacgctattcgtgctttgggatgtatttctggtgttatgattacggctagtcacaatccccaagcttacaatggttacaaagcttattggcaagaaggttctcaaattttggatgacattgcggatcaaattgcacaacacatggctgcactaactcagtatcaggaaatcaaacaaatgccttttgaaaaggctctggacagtggacttgttacttatattgatgagagtattgaagaagcatataaaaaagaagtgcttggtttaacgattaatgatactgacattgataagtcagtccgagtagtctatacccctttaaatggtgttgggaatctaccagtgcgtgaggttttaagacgccgcggttttgaaaatgtttatgtggtacctgagcaggaaatgcccgatcctgattttacaacagttggctatcctaatcccgaagtccctaaaacttttgcatattcagaaaaattaggtaaggcagttgatgctgatattttgattgcaactgatccagattgtgaccgtgtggctttagaagttaaaaatgcagtcggtgactatgtttttctcaatggcaataaaatcggagcgcttttatcttactatatcttttcacaacgatttgacttaggcaatttaccggctaatcctgttttagtgaaatccattgtaacaggagacttgtcacgggctattgctagccattatggtattgaaaccgttgaaacattgactggttttaagaatatttgtggcaaggcaaacgaatatgatgtgacgaaacaaaaaaactacctgtttggttatgaagaaagtattggtttttgctatggcacttttgttcgtgacaaagacgctgttagcgcctctatgatgattgtagaaatggcagcttactacaagaaaaaagggcagaatttactagatgttttgcagactatttatgcgacatttgggtattataatgaacgtcaaattgccttggagcttgaggggatagaaggacaaaaacgcattgcgaggataatggaagatttcagacagacaccaatagctagtgttgcagagatggcgttagacaagacaattgattttattgatggctatcaagattttccaaagcaaaactgtctcaaattttatttggatgatggttcttggtatgcacttagaccatcaggaacagagcctaaaataaaattttatttatatactattggccaaacacaagaaaatagtgcaacaaaattagatgctattgaagcagcgtgtcgcacaaaaataaatcaggttaattaa

SEQ ID NO: 1138 - protein, 564 aa, Streptococcus pyogenes
MTYNEVYQEWLHNNDLSDDIKADLAAIKDNEAEIQDRFYKTLEFGTAGLRGKLGAGTNRMNTYMVGKAAQALANTIIDHGPEAVKKGIAVSYDVRYQSRTFAELTCSIMAANGIKAYLYKGIRPTPMCSYAIRALGCISGVMITASHNPQAYNGYKAYWQEGSQILDDIADQIAQHMAALTQYQEIKQMPFEKALDSGLVTYIDESIEEAYKKEVLGLTINDTDIDKSVRVVYTPLNGVGNLPVREVLRRRGFENVYVVPEQEMPDPDFTTVGYPNPEVPKTFAYSEKLGKAVDADILIATDPDCDRVALEVKNAVGDYVFLNGNKIGALLSYYIFSQRFDLGNLPANPVLVKSIVTGDLSRAIASHYGIETVETLTGFKNICGKANEYDVTKQKNYLFGYEESIGFCYGTFVRDKDAVSASMMIVEMAAYYKKKGQNLLDVLQTIYATFGYYNERQIALELEGIEGQKRIARIMEDFRQTPIASVAEMALDKTIDFIDGYQDFPKQNCLKFYLDDGSWYALRPSGTEPKIKFYLYTIGQTQENSATKLDAIEAACRTKINQVN

SEQ ID NO: 1139 - DNA, 1410 bp, Streptococcus pyogenes
atggtttcagtgatgtggtttcgtagagatttaaggattgatgatcaaaaagctttagctcatgctattgctagtcaatcaccaaccttatgtgtgtttcaatttaacaaggagcaattaaatctgctacatagtcggaatcaatctagttttattactagcgttttggcttttagaaagttattaaaatgtgaaggtattgacttatatctaatgtatggagacttaatgacctgttttgagcaattattgacacaattaaaagactggacagatgtgtattttaactatgatgaatctggatatggtcgtttacgtgatcaaaaagcagcacaatttttcaaaaaaaatgggattgctgttcatacctaccaagatcactatttacatggtagtcaagagatcattaaccaatcaggtcagccttataaagtttttacgccctactataggatttggcaaaattatccgaaagagactcctattaaagtagaactatcgcaaggcaggtggttaaatcttgagacaccagatgatgttttaaggactgttgagagttttaaagatgaaaaatatcaggatgttgcaacttttgatgaagcgtcaaaacaactaaatcgatttattcaagaccaattagcagcttatcacgctaatcgagattttccagcgcagctagggacgagtcggttgtctccttttttaagaataggagctattggcattcgcacggtatatcacgctgtgcgtcaagcaccaaatagtctagggcaagctacttttttaaaagaattagcttggagagacttttacaatatggtctatgtggcttatcctgatcagaaaactcagcctatccaaaaagccttttctcaaatcgaatgggttaataatcctgactggtttcagttgtggaaagaaggtaaaacgggttaccctattgtcgatgctgcaatgcttcagttacaaaagacaggatggatgcataatcgtttacgaatgatagtagcttcttttttaactaaagatcttttatgtgattggcgtttaggagagcagtattttcaacaacaactaattgattatgatgctgccagtaatatcggaggatggcagtgggctgcttccactggaacagatgctgttccttattttagaatatttaatcctgttactcaaggtaagcgctttgatcctaaaggcgagtttattaaagcgtatttgcctcaactagaacacgttccagagaagtatctccacgaaccgtggaagatgccaaaaaaccttcaagagagtgtgtcctgtattattggcacagactatcctcaaccaattgtcgatcatgctaaacaacgtgaacaagctattgcaaagtatgagtgggcaaaagaaaaagcaaaaatagaatga

SEQ ID NO: 1140 - protein, 469 aa, Streptococcus pyogenes
MVSVMWFRRDLRIDDQKALAHAIASQSPTLCVFQFNKEQLNLLHSRNQSSFITSVLAFRKLLKCEGIDLYLMYGDLMTCFEQLLTQLKDWTDVYFNYDESGYGRLRDQKAAQFFKKNGIAVHTYQDHYLHGSQEIINQSGQPYKVFTPYYRIWQNYPKETPIKVELSQGRWLNLETPDDVLRTVESFKDEKYQDVATFDEASKQLNRFIQDQLAAYHANRDFPAQLGTSRLSPFLRIGAIGIRTVYHAVRQAPNSLGQATFLKELAWRDFYNMVYVAYPDQKTQPIQKAFSQIEWVNNPDWFQLWKEGKTGYPIVDAAMLQLQKTGWMHNRLRMIVASFLTKDLLCDWRLGEQYFQQQLIDYDAASNIGGWQWAASTGTDAVPYFRIFNPVTQGKRFDPKGEFIKAYLPQLEHVPEKYLHEPWKMPKNLQESVSCIIGTDYPQPIVDHAKQREQAIAKYEWAKEKAKIE

SEQ ID NO: 1141 - DNA, 735 bp, Streptococcus pyogenes
atgactgaggctattatttcaattaaagacttgcacaagtattatgggcacaatgaagtgcttaagggaattgatttagacattatgccaggagaggttgtggtgattattggcccttctggttctggaaaatcgaccttacttcgaaccatgaatcttttggaagtaccaactaagggacagattaggtttgaggggattgatattaccgataagaagaatgatattttcagcatgcgtgaaaaaatgggaatggttttccagcagtttaacctctttcccaatatgactattttagaaaatatcactttatcgccaatcaaaactaagggaatggctaaagcagaggctgacaaaacagccttgagcttgttggacaaagttggattatcagaaaaagccaaggcttatcctgctagtctttctggtgggcaacagcagcggattgcgattgcgcgtggactggctatggatccagatgttttactctttgatgaaccaacttcagctctagacccagaaatggtgggtgaggtcttggctgtcatgcaagatttggctaaatctgggatgactatggttattgtgactcatgaaatgggctttgctaaagaagtcgcagaccgtgtgatgtttatggatggcggcgttattgtggaagaaggaagtcctaaccaactttttgatctgactaaagaagaacgtacaaaagattttttgagtagagtattataa

SEQ ID NO: 1142 - protein, 244 aa, Streptococcus pyogenes
MTEAIISIKDLHKYYGHNEVLKGIDLDIMPGEVVVIIGPSGSGKSTLLRTMNLLEVPTKGQIRFEGIDITDKKNDIFSMREKMGMVFQQFNLFPNMTILENITLSPIKTKGMAKAEADKTALSLLDKVGLSEKAKAYPASLSGGQQQRIAIARGLAMDPDVLLFDEPTSALDPEMVGEVLAVMQDLAKSGMTMVIVTHEMGFAKEVADRVMFMDGGVIVEEGSPNQLFDLTKEERTKDFLSRVL

SEQ ID NO: 1143 - DNA, 657 bp, Streptococcus pyogenes
atggcttttaaagatacatttaacaagatgatttcttattttgacacggatgaggttaacgaagttgaagaagatgttgcagcatcaactgataacgttattccaagatcacaacaatcagtcagagcaagtagtcatccaaaacaagaacctagaaacaatcacgtacaacaagatcatcaagcgagatcccaagaacagacaaggtcacaaatgcatccaaaacatggcacttctgaacgctattatcagcagtctcagccaaaagaaggccatgaaatggttgacagaagaaaacggatgagcacttctagtattgcaaatcgccgtgagcagtatcaacaatcaacttgttcagatcaaacaactattgccttaaagtatcctcgtaaatatgaggatgctcaagaaattgtggatcttttaatagttaatgaatgcgttttgattgattttcagtttatgctagatgctcaggctagacggtgtttagattttattgatggtgctagtaaagtgctctatggtagcttacaaaaggtcggctcttcaatgtacttactggctccgtcaaatgtatccgtcaatatagaagaaatgactatcccacatactacacaagatattggctttgattttgatatgaaaaggcggtaa

SEQ ID NO: 1144 - protein, 218 aa, Streptococcus pyogenes
MAFKDTFNKMISYFDTDEVNEVEEDVAASTDNVIPRSQQSVRASSHPKQEPRNNHVQQDHQARSQEQTRSQMHPKHGTSERYYQQSQPKEGHEMVDRRKRMSTSSIANRREQYQQSTCSDQTTIALKYPRKYEDAQEIVDLLIVNECVLIDFQFMLDAQARRCLDFIDGASKVLYGSLQKVGSSMYLLAPSNVSVNIEEMTIPHTTQDIGFDFDMKRR

SEQ ID NO: 1145 - DNA, 1365 bp, Streptococcus pyogenes
atggctagaaatggcttttttactggtttggacattggaacaagctcgataaaagttttagtagcagaatttatttctggtgagatgaacgtcattggtgttagtaatgttccaagtaccggcgtaaaagatggcataataatcgatatagaggcagctgcgactgccatcaaaactgcggtagaacaagcagaagaaaaagcagggatgacaattgaaaaggttaatgttgggctaccggcaaaccttcttcaaattgaaccaacacaaggaatgattcctgtcccaagtgagtctaaagagataaaagatgaggatgttgatagcgttgttaaatcggctttaacaaaaagtatcacaccagaacgagaggttatctctttagttccagaagagttcattgtggatggctttcagggcattcgagatccacgtggtatgatggggattagattagagatgcgcgggcttatttatactggaccaagcaccattttacataatctgcgtaaaacggtagaaagagcaggcattaaagttgaaaacatcattatttctccgttagctatggctaaaaccattttaaacgaaggtgagcgcgagtttggagctactgtaattgatatgggaggtggacagacaactgtcgcttctatgcgagcacaagaattgcagtataccaatatatatgccgaaggcggcgaatacattactaaagatatatcaaaagtattaaaaacgtctttggctattgcagaagcacttaagtttaattttggtcaagcggagatatcagaagctagtataactgaaacagtaaaagttgatgtggtaggtagtgaagagcctgttgaggtaactgaacgttatttatctgaaattatttcagcgcgtattcgtcatattttagatcgtgtgaagcaagatttggaaagaggtcgtttactagacttaccaggaggcattgttttgattggtggcggtgcaatcatgcctggagtggtagaaattgcacaagaaatctttggagtaactgtaaagctccatgttccaaaccaagtcggtattagaaatccaatgttttcaaacgttatcagtttggtagaatatgttggtatgatgtctgaagtagacgttttagcacaaactgcagtttcaggagaagaacttttgcgacgcaagcctatcgatttcagtggccaagaatcttatttaccagattatgatgattcaagaagaccagaatcgaccattggctatgaacaacaagcgtcacaaacagcatatgattcacaagttccgagtgatcctaaacaaaaaatttcagaacgtgttcgtggcatatttgggagtatgtttgattaa

SEQ ID NO: 1146 - protein, 454 aa, Streptococcus pyogenes
MARNGFFTGLDIGTSSIKVLVAEFISGEMNVIGVSNVPSTGVKDGIIIDIEAAATAIKTAVEQAEEKAGMTIEKVNVGLPANLLQIEPTQGMIPVPSESKEIKDEDVDSVVKSALTKSITPEREVISLVPEEFIVDGFQGIRDPRGMMGIRLEMRGLIYTGPSTILHNLRKTVERAGIKVENIIISPLAMAKTILNEGEREFGATVIDMGGGQTTVASMRAQELQYTNIYAEGGEYITKDISKVLKTSLAIAEALKFNFGQAEISEASITETVKVDVVGSEEPVEVTERYLSEIISARIRHILDRVKQDLERGRLLDLPGGIVLIGGGAIMPGVVEIAQEIFGVTVKLHVPNQVGIRNPMFSNVISLVEYVGMMSEVDVLAQTAVSGEELLRRKPIDFSGQESYLPDYDDSRRPESTIGYEQQASQTAYDSQVPSDPKQKISERVRGIFGSMFD

SEQ ID NO: 1147 - DNA, 204 bp, Streptococcus pyogenes
atgaaaacactatatgatgtgcaacaattgctaaaaaactttggcatttttgtttaccttggcaaacgtctttatgatattgaaatgatgaagattgaacttcagcgtctctatgatagcggcttattggataagagggattacttaaatgcggagttaattttgcgacgtgagcatagattagaattggaaaaagaaggatag

SEQ ID NO: 1148 - protein, 67 aa, Streptococcus pyogenes
MKTLYDVQQLLKNFGIFVYLGKRLYDIEMMKIELQRLYDSGLLDKRDYLNAELILRREHRLELEKEG

SEQ ID NO: 1149 - DNA, 978 bp, Streptococcus pyogenes
atggtaaccattaaacaagttgctgaagaagcaggtgtttctagatcaacagtctccaggtatatttctcaaaaaggatatgtatctgatgatgcaaggcataaaatcaaagcagcgatagcaaaattacattacactccaaatgtcttggcgcagtcattgaagacgaaaaaaaatcaactagtcggtttattattaccagacatttccaatcctttttttccgaggttagcaagaggagcagaagaatatttaaaagaaaaggggtatcgggttatgctaggaaatatttcagacagcgaagctcttgaagaagaatacgtccatgtccttcttcaaagcaatgctgctggcattattactacccatgactttacaaagcggtatcctactcttgctattccagttgtagtggtagatcgtgttgaccaagagacccagtacggtgtcttttcagataatagggcagggggcttattggcggctcagactgtctggcaagcaggggcaaaagaagttttgttaataagaggtccgctggataatgctgaaaacattaatgagcggtttgaagctagtttttcttaccttcaaaaacaagacgtgactatgtatgtgtgtgatagtcagaattttgattttgaaagtattcagctagaagctagttacaacctcaagtgttacccaacaatagacagtattatagcaccttctgatatccatgctattgcttatattcatgaactgcattctcaaggtaaaaagattcctcaagatgttcaaataataggttatgatgacattttaatgagtcaatttatttatccttctttatcgactattcatcaatcctcttatttgatgggccgttatgccgccgaattagtttatactattgctagtcaattaactgtgaaagcaaatcggattaaattgcctgttcactacgttgagcgagaaacaataaggaaaagataa

SEQ ID NO: 1150 - protein, 325 aa, Streptococcus pyogenes
MVTIKQVAEEAGVSRSTVSRYISQKGYVSDDARHKIKAAIAKLHYTPNVLAQSLKTKKNQLVGLLLPDISNPFFPRLARGAEEYLKEKGYRVMLGNISDSEALEEEYVHVLLQSNAAGIITTHDFTKRYPTLAIPVVVVDRVDQETQYGVFSDNRAGGLLAAQTVWQAGAKEVLLIRGPLDNAENINERFEASFSYLQKQDVTMYVCDSQNFDFESIQLEASYNLKCYPTIDSIIAPSDIHAIAYIHELHSQGKKIPQDVQIIGYDDILMSQFIYPSLSTIHQSSYLMGRYAAELVYTIASQLTVKANRIKLPVHYVERETIRKR

SEQ ID NO: 1151 - DNA, 849 bp, Streptococcus pyogenes
atgttggaacacaaaattgattttatggtaactcttgaagtgaaagaagcaaatgcaaatggtgatcccttaaatggaaacatgcctcgtacagatgccaaaggatatggtgtgatgagtgatgtctccattaaacgtaagattcgtaatcgtttgcaagatatggggaagtctatttttgtgcaagctaatgagcgtattgaagatgattttcgttcactggaaaaacgcttttcgcaacattttacagctaagacacctgacaaagaaattgaagaaaaagcaaatgcattatggtttgatgttcgtgcttttggacaagtttttacttatctgaaaaaatcaattggggtgcgtggaccagtttccatcagtatggctaagtccttggagccaattgtcatttccagccttcaaattacgcgtagtaccaatggtatggaagctaagaataatagtggccgctcttctgatacgatggggacaaaacattttgtagattatggtgtgtatgtacttaaaggttctatcaatgcttattttgctgaaaagactggtttttctcaggaagatgctgaggctattaaagaagttttggttagcttgtttgaaaatgatgcgtcgtctgcacgtccggaaggctctatgcgagtttgtgaagtcttttggtttacgcattcaagcaaattgggaaatgtttcaagtgcgcgtgtctttgacttgttagagtatcatcaatcaatagaagaaaaaagcacttatgacgcttatcagattcatctaaatcaagaaaaattggctaaatatgaagcgaaagggttaacgcttgaaatcctagaaggactctag

SEQ ID NO: 1152 - protein, 282 aa, Streptococcus pyogenes
MLEHKIDFMVTLEVKEANANGDPLNGNMPRTDAKGYGVMSDVSIKRKIRNRLQDMGKSIFVQANERIEDDFRSLEKRFSQHFTAKTPDKEIEEKANALWFDVRAFGQVFTYLKKSIGVRGPVSISMAKSLEPIVISSLQITRSTNGMEAKNNSGRSSDTMGTKHFVDYGVYVLKGSINAYFAEKTGFSQEDAEAIKEVLVSLFENDASSARPEGSMRVCEVFWFTHSSKLGNVSSARVFDLLEYHQSIEEKSTYDAYQIHLNQEKLAKYEAKGLTLEILEGL

SEQ ID NO: 1153 - DNA, 564 bp, Streptococcus pyogenes
atgaaccttatcatcattggtgctcaagcgtcgggcaagatgaccattgggcaagaagttgccaggcagacaggcatgactttgtttcataatcacgattctattgactttgttttacggtttatgccttggtctcaagagagcactgccttgattgaacgtatccgttttgctttttttgaaacctttgctaagacaggtcaagacatgatttttactattgtaattgacttcaatgatccaaatgatgtagcaatgcttgaaaagattcaggctgtttttcagtcttatgaccaagaggttctctttgtcgaattaaaaacagatatagaggaacgtcttaaacgcaatcgcacagaaaatcgtctcaaacataaacctcttaaacgcaacatcgagtggtcagaacaagatattcaatccacgatggcatatgctgtttttaatccagaagaaccacccaaaacgctcacgcattaccaaaaaatcaataatacccagctcaccgctgctgaaacagcgcagcttattatccaaaaaatgactcatatcaaggagaactaa

SEQ ID NO: 1154 - protein, 187 aa, Streptococcus pyogenes
MNLIIIGAQASGKMTIGQEVARQTGMTLFHNHDSIDFVLRFMPWSQESTALIERIRFAFFETFAKTGQDMIFTIVIDFNDPNDVAMLEKIQAVFQSYDQEVLFVELKTDIEERLKRNRTENRLKHKPLKRNIEWSEQDIQSTMAYAVFNPEEPPKTLTHYQKINNTQLTAAETAQLIIQKMTHIKEN

SEQ ID NO: 1155 - DNA, 1134 bp, Streptococcus pyogenes
atgattgattttattatttctattgatgattgcgcagttgaattggatagtcgtcaatcttggaaaattcgctaccccttatcaaccattctatttcttggctttcgttggcaagtagctggcattgaaacctggaaggagatggaagattttattgaaatgaatgaaccattgtttgcgacctacgttgatttgagtgaaggttgtccgtctcatgataccttagagcgtgtgattagtcttgttaattcagaccgtttaaaagagcttaaagttcaatttgagcaatcattgacaagcttagatgccgttcatcaactgatttcagtggacggtaaaacgattcgaggcaatcgaggtaaaaatcagaagcctgttcatattgtaacggcttatgatgggggtcatcatcttagtttgggacaggtagcggttgaggagaaaagtaatgaaattgttgccatccctcagctattgcggacaattgatatccgtaaaagcattgtaacgatagacgcaatgggcacgcagacggctatcgttgatacgattataaaaggtaaagcagactattgcttagccgtcaaaggaaatcaagaaacactttatgatgatattgctctttattttagtgatgtcaacttattggaagaactccaagaaaatgcacagtattatcagactgttgaaaaatctaggggacagattgaagttagagaatactgggtgtcttccgatatcaaatggttgtgtcaaaattatcccaaatggcataagttacgtggtattgggatgactcgtaacacgattgataaggatggtcagctgagtcaagagaatcgttattttatctttagctttaagccggatgtcctcacatttgccaattgtgtacgaggtcattggcagatagagagtatgcactggttattggacgttgtttatcatgaagatcatcatcagacattggataaaagagccgcatttaacctaaatcttatccgaaaaatgtgcttatattttctcaaagtgatggtatttcctaaaaaagacctcagttatcgtcgcaaacaacggtatatttctgtccatttggaagattatttagtccaattatttggagaaagaggctaa

SEQ ID NO: 1156 - protein, 377 aa, Streptococcus pyogenes
MIDFIISIDDCAVELDSRQSWKIRYPLSTILFLGFRWQVAGIETWKEMEDFIEMNEPLFATYVDLSEGCPSHDTLERVISLVNSDRLKELKVQFEQSLTSLDAVHQLISVDGKTIRGNRGKNQKPVHIVTAYDGGHHLSLGQVAVEEKSNEIVAIPQLLRTIDIRKSIVTIDAMGTQTAIVDTIIKGKADYCLAVKGNQETLYDDIALYFSDVNLLEELQENAQYYQTVEKSRGQIEVREYWVSSDIKWLCQNYPKWHKLRGIGMTRNTIDKDGQLSQENRYFIFSFKPDVLTFANCVRGHWQIESMHWLLDVVYHEDHHQTLDKRAAFNLNLIRKMCLYFLKVMVFPKKDLSYRRKQRYISVHLEDYLVQLFGERG

SEQ ID NO: 1157 - DNA, 186 bp, Streptococcus pyogenes
atgattgatttaaaaaggaatcttttcaaaattgatgtccgggcacaaaaggatgaagagaaagttttcatgcgtacggcgtgtagacaatctagggtttacttgctatttcatcttgtttatggtatcatttcacaggctaagggtgcttcatggataacaacgagattttgtattcctaaataa

SEQ ID NO: 1158 - protein, 61 aa, Streptococcus pyogenes
MIDLKRNLFKIDVRAQKDEEKVFMRTACRQSRVYLLFHLVYGIISQAKGASWITTRFCIPK

SEQ ID NO: 1159 - DNA, 1485 bp, Streptococcus pyogenes
atgtataaggtactattagttgacgatgaatacatgattttacaagggctcaccatgattattgattggcaggcacttggatttgaagtggttcaaacagcaagatcaggcaaggaagccttagcctatttgactcagtacccagtggatgtcatgatttcagatgttaccatgcctggaatgacaggactggatttaatagaagcagctaaaacctatcatcctcagctacaaaccttgattttatctggttatcaagaattctcctatgtgcaaaaggctatggaattagaaaccaaggggtatttgttaaaacctgttgataaggcagaattacaggctaaaatgaaacaatttaaagactggttggatgcccagcaggcagaatcaatccggcaagaagcctatcatgacagccttttgaccctttggcttacagatgaattgagtgagaaagaatttcagcagttaagtcaaggcttgccagcggctgctttaactggttttacagtgctgtatttggactgtcaagagtggcaagcagccatcgatgcttattttgaacgagaaggtcagcctttttatctcaaaaaagaagaagataagaaggtttatctggctgtcctacttggtaaaactgatcaagccaaggcgtttacctatgatctacaaaagcgattctcaagaaacatgcatcaacttattttgggagaaacagttgatgactgggaaaatgtttatgaaagctacaatcaggtgcttaagagcctcttttacaattgtgaagtgtcaccaattagagcaaaagataagtccaaaattgaactaccagagtcccgtttgcagttctttgcttttaacaaggcgttgatgattggggacgaacctacaatcttgtctaaattagaagctatttttgacgagatgaagaccttgaacttttcaccagaggatgtgaagcatgtttcgttcttgttgttttctgacatttatcgtcaatttcccattttagataaaatgacttatctgtccatggtaaaaactattcatgacagccaatccattgattgcattttgagggaactaaaaaaagtgttggatgtcaccaatcagaacaattcccctgaaaaacgctattcagatttagttagtgaaaccattgattgcattcgcaaggaataccatcaagaattaactcttaaagctatcgctgataggttacatgtcaatggggtttatttagggcaatgctttaaaaatgaaaccgagcgtagttttacccagtacttaaatcatgttaggattcaaaaagcgcaacagttattgctttacaccaaccaatccatcaatgaaattgcttatgaaacaggttacaataccaatcattattttatcaagatgtttaaaaagttgaatggtttatcgccaaaagagttcagagatcgttacaaggacaattaccaagccatcaagggcgaccagtaa

SEQ ID NO: 1160 - protein, 494 aa, Streptococcus pyogenes
MYKVLLVDDEYMILQGLTMIIDWQALGFEVVQTARSGKEALAYLTQYPVDVMISDVTMPGMTGLDLIEAAKTYHPQLQTLILSGYQEFSYVQKAMELETKGYLLKPVDKAELQAKMKQFKDWLDAQQAESIRQEAYHDSLLTLWLTDELSEKEFQQLSQGLPAAALTGFTVLYLDCQEWQAAIDAYFEREGQPFYLKKEEDKKVYLAVLLGKTDQAKAFTYDLQKRFSRNMHQLILGETVDDWENVYESYNQVLKSLFYNCEVSPIRAKDKSKIELPESRLQFFAFNKALMIGDEPTILSKLEAIFDEMKTLNFSPEDVKHVSFLLFSDIYRQFPILDKMTYLSMVKTIHDSQSIDCILRELKKVLDVTNQNNSPEKRYSDLVSETIDCIRKEYHQELTLKAIADRLHVNGVYLGQCFKNETERSFTQYLNHVRIQKAQQLLLYTNQSINEIAYETGYNTNHYFIKMFKKLNGLSPKEFRDRYKDNYQAIKGDQ

SEQ ID NO: 1161 - DNA, 1725 bp, Streptococcus pyogenes
atgagtgttaaaacattgggaaggtatgtgactaaccactttaagcagggttttttgattaatcgactgatgaaattatatagcctgctaattgtaagttttttcactttagcagctattggcttgagcagttattctattagtagtacttataaaagggtggatgctgaggcgcagatgcgattggaggagactctaggtagattgcagtcacaaaacgatattaccctacgggttttagaccagttggttggccgttcagaagattaccataatctctatcaatacatgacgttaaccccaaaccaatatttttcaaacgtttttgaagactgggaaaaaggaaaagacacggtcctattttctgaagaggtgaggcgtctttttgacttgtaccctgatgtgacttctatgaccctactgctagaggacagtagtgcttatctgtacgccgataaggtcattaagacgggtcgtttgctttatagcaagcctgaaaaagtaaccggaaatgttttagttcgctctattcgaaatccagaatcaggagatgtgacaggtcgtctttacctgacctttgacaaaccaccgactttggtagagacacagcaggatcactatttagctacttttgcttttgattactatggccgcaaactcttccatcaaggaggtcggagatttcctcatttagaggctgaggttaaaaaggctatcaaggcagatcgggcagctgatcttagtaatcttagcaaggcttatcggatgcagtacaatcgctcgggagacctcttggcttatgtggctgtcagaaaatcctatttattagcggaagctgtcaggacagtttttgtgtatggccttgtttctctacttttagcttggctgttattgcagttgctctttagggttttccgaaattatatccagcaggtttctgaaattacggatactgttgaaatggttgcagcaggcgatttgtctttaaccatcgacaacagccacatggaattggaactgtatcatatctcagaagccattaatcagatgttggccagcattaaagcttatattgacgaagtttatgtgttagaggtagagcaacgagatgcccaaatgagagctctgcagtctcaaatcaaccctcattttttatacaacacgttagagtatattcggatgtacgcccttagttgtcaacaagaagaattagcagatgtcatttatgcctttgcgagtctgcttcgcaacaatattagccaagataagatgaccaccttaaaagaagaactggctttttgtgaaaagtacatttacctttatcaaatgcggtatccagatagcttcgcttatcatgtaaaaattgatgagagtgttgctgacttagccattcctaaatttgtcattcaacctctcgttgaaaattattttgtgcatgggattgattatagtcgccatgacaatgcactaagcatcaaggctttagatgagacggatcatctcttgattcaggtgcttgataatggacgtggtattagtcaagagcgcttagcagatatggaaaaaaggcttcaagagcaccaaacaacaggcaatagctctattggtttgcaaaatgtttacctccgtctctttcatcattttcgagacagggtttcttggtccatggctaaggagccaaatggtggctttatcattcaaattaggattagaaaggatgcttga

SEQ ID NO: 1162 - protein, 574 aa, Streptococcus pyogenes
MSVKTLGRYVTNHFKQGFLINRLMKLYSLLIVSFFTLAAIGLSSYSISSTYKRVDAEAQMRLEETLGRLQSQNDITLRVLDQLVGRSEDYHNLYQYMTLTPNQYFSNVFEDWEKGKDTVLFSEEVRRLFDLYPDVTSMTLLLEDSSAYLYADKVIKTGRLLYSKPEKVTGNVLVRSIRNPESGDVTGRLYLTFDKPPTLVETQQDHYLATFAFDYYGRKLFHQGGRRFPHLEAEVKKAIKADRAADLSNLSKAYRMQYNRSGDLLAYVAVRKSYLLAEAVRTVFVYGLVSLLLAWLLLQLLFRVFRNYIQQVSEITDTVEMVAAGDLSLTIDNSHMELELYHISEAINQMLASIKAYIDEVYVLEVEQRDAQMRALQSQINPHFLYNTLEYIRMYALSCQQEELADVIYAFASLLRNNISQDKMTTLKEELAFCEKYIYLYQMRYPDSFAYHVKIDESVADLAIPKFVIQPLVENYFVHGIDYSRHDNALSIKALDETDHLLIQVLDNGRGISQERLADMEKRLQEHQTTGNSSIGLQNVYLRLFHHFRDRVSWSMAKEPNGGFIIQIRIRKDA

SEQ ID NO: 1163 - DNA, 1695 bp, Streptococcus pyogenes
atgaccatttatcacgccttaaaggattatcaagaagtcatgacaagaggagactatcttgtctttgacacgccattgacttgccgatttattggccgttttttccgctttgaaaatcaaaaagccctgctggcagaattggcaacgtcaaagtattttcagtggattgaagaaggccaagcagaggtgacgatgaaacacttttttaaccgtcagctggctaaggatgcctttaccctgaagatttcagaagataaggaaatcattattgaaagccaaaaccttagaggttttcgttacgcccaagaagctttgcttaaagtcatgaccttcaaaggggataaactttatttgcccattgtttctgtcaagcacagcccttcttttgctatgcgggggataattgaaggcttttacggaacaccgtggacacgagaagagcggttagattgcctgcgttttattggaaataaaaggatgaatacttacatgtatgctcctaaagatgatgattaccaacgaaaactgtggcgcgatctttatcctgaggattgggtgacttatttcaaagagctacttgcagtagccaaggaagaagggcttgatttttggtatatgattagtccggggcttgattttgattataccaaggaagctgactatcagttgctctatcaaaaattgcaacaacttctagcgttaggtgtttgtcattttgggcttttgctggatgatattgactaccaaattgtagatgctgttgagagacgattcaaaaagactgcctatgcccaggcccacttggcaactgaggttcatcactttttaaaccaacaacatgcggcgccagaattggtgatctgtccgacagaatacgacaaccaccatgattctatctatttgcaagagctgtcagaaaggattcctaaagaagtcgcctttttctggacaggcccaagcacgctagcgagtcaaatctcgcaagcagatattgaaactatggcagcagtatatcaacggcctatcattatttgggacaatattcctgttaatgattatcaaaaagatccagaacgtctctttttaaccccttttgccaatcgctcgccatttttatgccagccagactatcaggtcaaggggattgtttctaaccctatgattagttgggaattatctaagcttaccttgacagatatgagccattatctgtgggatgctaaccgttatcagcctagtcattcttggctagaaaccttaacagactatacagaagatactgaattagccttagctttacaggcatttgcttggcataatggcaatcgtcatctgcacagggaccttccttttgaagtggaagaagctctcctggctaaggatgtatcaacgttatcagcttgggtagctgaattggtcgaacgtgtcaatacgttgagaaagctagataagccagcgtttcaacaagctattgctccttggtttgaacgggtggccaaagaccaagatttttggcaggctatgttaaatcaggagcctcagttggaaacactctatgctgacttacaagaagataaacaccgtattggaagtgacattccaagtcgttactatcgcatctactatcaacagcaagataaactaacagctaatcaaggtcaagttacccaagcaagaccggaagactatgcttag

SEQ ID NO: 1164 - protein, 564 aa, Streptococcus pyogenes
MTIYHALKDYQEVMTRGDYLVFDTPLTCRFIGRFFRFENQKALLAELATSKYFQWIEEGQAEVTMKHFFNRQLAKDAFTLKISEDKEIIIESQNLRGFRYAQEALLKVMTFKGDKLYLPIVSVKHSPSFAMRGIIEGFYGTPWTREERLDCLRFIGNKRMNTYMYAPKDDDYQRKLWRDLYPEDWVTYFKELLAVAKEEGLDFWYMISPGLDFDYTKEADYQLLYQKLQQLLALGVCHFGLLLDDIDYQIVDAVERRFKKTAYAQAHLATEVHHFLNQQHAAPELVICPTEYDNHHDSIYLQELSERIPKEVAFFWTGPSTLASQISQADIETMAAVYQRPIIIWDNIPVNDYQKDPERLFLTPFANRSPFLCQPDYQVKGIVSNPMISWELSKLTLTDMSHYLWDANRYQPSHSWLETLTDYTEDTELALALQAFAWHNGNRHLHRDLPFEVEEALLAKDVSTLSAWVAELVERVNTLRKLDKPAFQQAIAPWFERVAKDQDFWQAMLNQEPQLETLYADLQEDKHRIGSDIPSRYYRIYYQQQDKLTANQGQVTQARPEDYA

SEQ ID NO: 1165 - DNA, 642 bp, Streptococcus pyogenes
atgagtaagataaaagtgatattggtcgatgatcatgaaatggtccgcatgggactcaagagttttttgaatttacaagctgatattgatgtcgttggtgaggcctctaatggacgtgaaggggttgatttggcattggctttgaagccagatgttttggttatggatctagtgatgccagagttaggcggtgttgaggcaactttagaagtcctaaaaaaatggaaagaggctaaggtacttgtgttaacttcctatctagataatgaaaagatataccctgtcattgatgcaggagcgaagggttatatgttaaaaacatcgagtgcggctgaaattttaaatgccattcgcaaggtttcaaagggagagttagctattgaaacagaagttgacaaaaaaattaaggcgcatgatcaacaccctgacttgcatgaggaactaacagcgcgtgagtatgacattttacaccttttagctaaagggtatgataatcagaccatcgctgatgaactctttatttccttaaaaaccgtcaaaacacatgtgtccaatattctagccaagttagaagttggtgaccgaacccaagcggttgtctatgcttttcgacatcatttagtcccccaagacgataattaa

SEQ ID NO: 1166 - protein, 213 aa, Streptococcus pyogenes
MSKIKVILVDDHEMVRMGLKSFLNLQADIDVVGEASNGREGVDLALALKPDVLVMDLVMPELGGVEATLEVLKKWKEAKVLVLTSYLDNEKIYPVIDAGAKGYMLKTSSAAEILNAIRKVSKGELAIETEVDKKIKAHDQHPDLHEELTAREYDILHLLAKGYDNQTIADELFISLKTVKTHVSNILAKLEVGDRTQAVVYAFRHHLVPQDDN

SEQ ID NO: 1167 - DNA, 2385 bp, Streptococcus pyogenes
atggaaaaagtagctcatgtgattgtagatattccattgatgcaaacggacaagccattttcttatggtattccaaaagagttagtttctctcgtgcagcttggttctcgtgtgcatgttccttttggaaaagggaatcgtttgttgcaaggctttattattggttttggccaagaagattcaagctctcttaaactgattcagaccgttttagatcctgagccagtcctaaaccaagagcaattgacccttgctgatcagcttcgaaaaacagttttttcttataaaatcacgctcttaaaagcaatgattcctaatcttcttaactctaactatgataaagtgctaaggccagagtcaggtctaaaaaagtctgatagggactttctttttgaaggaaaaccatctgtcttatattctaccttagaccgcgagaaggaaaaaatagctcttaagggcatacaagctgggcatattactgttagttatttagccaaagacaagaaaaacctaaagacagaaaaatattatcacgtcgacttagacgccttagcggtacatcccatctctagtcgtgccaaaaagcgtcaattattaaaagactatctgctaacccatacgaaggaagctaaacttgcaacgctttatcaagccttttctagagatgtggtggcttactttgtgacaaatcacttaattcgtattgacgaacgtccaattgatcgcagtgagtcctattttgaccagatcaaaccatcttcttttttaaccttaaatgaacagcaggcgtcagctgttactgaaattgttgaacaaattgggaaaccgagtaaaccttttttgattgaagggattacaggttcgggtaagacagaagtttatcttcatatcatcgaagcggttttaaaacaggataagacagccattgttttagtgccagaaatttcgttgactcctcagatgacctctcgttttatttcccgtttcggaaagcaagtggctattatgcattcaggcttatcagatggtgaaaagtttgatgagtggcgcaagataaaaacaggacaggctaaggttgtggttggtgcccgctctgctattttctccccactagagcggattggtgcaattattatcgatgaggagcatgaatcaacctataaacaagaaagcaaccctagataccatgccagagaggttgccctgctcagagctaaacaccatcaagcagttgtggttatgggctctgctacgccaagtattgaaagccgagcaagggctagtaagggtgtctatcattttattcaattaacgcaaagagcaaaccctcttgctaagattccagaagtaacgattgttgattttcgtgattatattggacagcaagcagttagtaattttaccccatatttgattgataagattaaagaacgtttggttaaaaaagaacaagttgtcttaatgttaaatagacgtggttattctagttttgtgatgtgtcgggactgtggttatgtggacaaatgtcccaactgtgatatctctttaacccttcacatggatactaaaactatgaattgccattactgtgggtttcaaaaacctatcccaattacttgtcctgagtgtcatagcaatagtatccgctattatggcactggaactcaaaaagcttttgatgaattgcaaggggttattccagaagctaagatcttgagaatggatgttgacaccacacgaaaaaaaagaagtcacaaaaccatactagatagttttggtcgccaggaagcagatattttgttagggacgcaaatgattgccaaaggactggattttccaaatgtgactttagttggggtactaaatgcagatacttccttaaatttgccggattttcgagcgtcagaaaaaacgtttcaattgttaacacaggttgctggtcgggcaggccgtgcccataagccaggagaggtcttgattcaaacttataatcccgatcactatgctattcaattagctaagaaacaagattttgaagctttttaccgttatgagatgtctattcgtcatcaaatggcttatcccccttactactttacagtgggtattacgctttcgcatcgtttagaagcatcggttgtaaaaaaagcttatcaagttacagaactgctaaagagtcacttatcggataatattaaaatattaggaccgactcctaagccaattgctagaacacacaatttataccactatcaaattttgttaaaataccgttttgaagataacctagaagagacgctcaatcgtattcttgattggagtcaagaagcagataatcgtcatttaaaactaattattgattgtgaaccgcaacaatttttataa

SEQ ID NO: 1168 - protein, 794 aa, Streptococcus pyogenes
MEKVAHVIVDIPLMQTDKPFSYGIPKELVSLVQLGSRVHVPFGKGNRLLQGFIIGFGQEDSSSLKLIQTVLDPEPVLNQEQLTLADQLRKTVFSYKITLLKAMIPNLLNSNYDKVLRPESGLKKSDRDFLFEGKPSVLYSTLDREKEKIALKGIQAGHITVSYLAKDKKNLKTEKYYHVDLDALAVHPISSRAKKRQLLKDYLLTHTKEAKLATLYQAFSRDVVAYFVTNHLIRIDERPIDRSESYFDQIKPSSFLTLNEQQASAVTEIVEQIGKPSKPFLIEGITGSGKTEVYLHIIEAVLKQDKTAIVLVPEISLTPQMTSRFISRFGKQVAIMHSGLSDGEKFDEWRKIKTGQAKVVVGARSAIFSPLERIGAIIIDEEHESTYKQESNPRYHAREVALLRAKHHQAVVVMGSATPSIESRARASKGVYHFIQLTQRANPLAKIPEVTIVDFRDYIGQQAVSNFTPYLIDKIKERLVKKEQVVLMLNRRGYSSFVMCRDCGYVDKCPNCDISLTLHMDTKTMNCHYCGFQKPIPITCPECHSNSIRYYGTGTQKAFDELQGVIPEAKILRMDVDTTRKKRSHKTILDSFGRQEADILLGTQMIAKGLDFPNVTLVGVLNADTSLNLPDFRASEKTFQLLTQVAGRAGRAHKPGEVLIQTYNPDHYAIQLAKKQDFEAFYRYEMSIRHQMAYPPYYFTVGITLSHRLEASVVKKAYQVTELLKSHLSDNIKILGPTPKPIARTHNLYHYQILLKYRFEDNLEETLNRILDWSQEADNRHLKLIIDCEPQQFL

SEQ ID NO: 1169 - DNA, 315 bp, Streptococcus pyogenes
atgttaaaaccttccattgataccttattagataaagtaccatccaagtattcacttgtgattttacaagccaaacgtgcccatgaactagaagctggtgccactccaactcaagaatttaaatcagtgaagtcaacacttcaggcacttgaagaaattgaatcaggaaacgttgtgattcacccagatccttcagctaaacgtgaagctgtccgtgctaagattgaggcagaacgcttggccaaagaggaagaggaacgtaaaatcaaagaacaaattgccaaagaaaaagaagaagaaggagaaaaaatctaa

SEQ ID NO: 1170 - protein, 104 aa, Streptococcus pyogenes
MLKPSIDTLLDKVPSKYSLVILQAKRAHELEAGATPTQEFKSVKSTLQALEEIESGNVVIHPDPSAKREAVRAKIEAERLAKEEEERKIKEQIAKEKEEEGEKI

SEQ ID NO: 1171 - DNA, 651 bp, Streptococcus pyogenes
atgtgtaaagaaatcacaataaaagaagcggtagctcacgttaaagatggtgataccattatggttggtggcttcatgacaaatggcacaccagaaaaattaattgatgcacttgtggaaaaaggtgtcaaagacctcactttaatctgtaacgatgccggttttcctgacaaaggcgttggtaagatggttgccaataaacagttttcaactattattgcatcacatatcggtctcaaccgtgaagcaggccgacaaatgactgagggcgagactgtaattgatcttgtacctcagggaacattagctgagcgcatccgcagtggcggttttgggctaggcggtttcttaacacctactggaataggaaccgaagttgccaaaggaaaagaagtcattactattgacggcaaagactaccttcttgaaaaacctttgaaagctgatgtcgcacttatttttgctaacaaggcagataaaaatggcaatttgcaatacgcaggttctgaaaataactttaatcatgtgatggctgctaatgcgaaaaccaccattgttgaagcaagagaaattgttgacgtggggcaaatggatcctaattttgtccatactcctggcatttttgttaactacttagtgaaaggagcctaa

SEQ ID NO: 1172 - protein, 216 aa, Streptococcus pyogenes
MCKEITIKEAVAHVKDGDTIMVGGFMTNGTPEKLIDALVEKGVKDLTLICNDAGFPDKGVGKMVANKQFSTIIASHIGLNREAGRQMTEGETVIDLVPQGTLAERIRSGGFGLGGFLTPTGIGTEVAKGKEVITIDGKDYLLEKPLKADVALIFANKADKNGNLQYAGSENNFNHVMAANAKTTIVEAREIVDVGQMDPNFVHTPGIFVNYLVKGA

SEQ ID NO: 1173 - DNA, 825 bp, Streptococcus pyogenes
atgacactacaagaagagataattcgacaattaggcgtcaaggctagcattgacccacaagaagaaattcggaaagccgttgattttttaaaagcttatttgcgtaagcactcatttttaaaaacttatgtcttaggcatttcgggaggtcaggattctaccctcgcaggaaagctagcccaaatggccattgcagagttacgggaggaagcaagtgatcaagcttaccaatttatagctgttcgcttgccttatggggttcaggctgatgaagcagatgcgcaaaaagccttggcttttattgcaccagatcagacccttaccattaatatcaaggcagctgtggacggtcaagtagaggctctacaagcagcaggcgttgagatttctgatttcaataaaggtaatattaaagcacgtcagcgaatgatcagtcaatatgccattgctggccaaatggctggtgctgttattggaacggatcatgcggcagaaaacatcactggtttctttactaaatttggtgatggtggagcagatattcttcccctctttaggcttaacaaacgtcaaggaaaggctcttttgaaagttttaggagcagatgctgctttgtatgaaaaagttccaactgctgatttagaagatcaaaaaccaggcttggctgatgaggttgctctaggggtgacctatcaagacatcgacgactatttggaagggaagctgatttccaaagtagctcaagcaactattgaaaaatggtggcataaaggacaacacaagcgtcacctgccaatcaccatttttgatgatttttggaaataa

SEQ ID NO: 1174 - protein, 274 aa, Streptococcus pyogenes
MTLQEEIIRQLGVKASIDPQEEIRKAVDFLKAYLRKHSFLKTYVLGISGGQDSTLAGKLAQMAIAELREEASDQAYQFIAVRLPYGVQADEADAQKALAFIAPDQTLTINIKAAVDGQVEALQAAGVEISDFNKGNIKARQRMISQYAIAGQMAGAVIGTDHAAENITGFFTKFGDGGADILPLFRLNKRQGKALLKVLGADAALYEKVPTADLEDQKPGLADEVALGVTYQDIDDYLEGKLISKVAQATIEKWWHKGQHKRHLPITIFDDFWK

SEQ ID NO: 1175 - DNA, 1380 bp, Streptococcus pyogenes
atgtctataaaagaacaaacagacaataacgaactagaaaatggaatggtaaggggcttagaaaatcgtcatgtgcagttaattgcgatcgcaggaacgattggaacaggtctctttttaggggcaggacgctctattgccctaacaggaccatctattatttttgtgtatatgattacaggtgccttcatgtttatgatgatgcgtgccatcggtgaaatgctctattatgatccagatcaacacacctttatcaattttatttccaaatacattggtccaggctggggttatttttcgggtctatcctattggatttcccttatttttattggaatggcagaaatcacagcagtaggtgcttatgtgcaattttggttcccaagctggccagcctggttgattcagttggttttcttagtcttacttagttcgatcaacttaattgctgtgcgcgtttttggggaaacagagttttggtttgccatgattaagattttagctattttagctttgattgcaacagctattttcatggtattgacaggttttgaaactcacacaggccatgctagcctttccaatatttttgaccatttttccatgttcccaaatgggaaactaaagttctttatggccttccaaatggttttctttgcttatcaagctatcgaatttgtgggaattaccacttctgagacggctaacccaagaaaagttctaccaaaggctattcaagaaattccaacccgtattgtgatcttttatgtgggagccttggtctctattatggcaattgtgccatggcatcagttaccagttgatgaatctccttttgtgatggtgttcaaattgattggtattaaatgggcagcagccttgattaactttgtggtcttgacatcagcagcgtcagcgcttaactcaaccctttattcaaccggtcgtcatctctatcagattgctaatgagactccaaacgctttgaccaatcgcttaaagattaatactttatctcgacaaggggtgccaagtcgtgccattattgcttcagcggttgtggttggtatctcagctttgattaatatcctaccaggagttgcagatgcgttctcactcattacggcctcctcatcaggtgtatatattgctatctacgccttaaccatgattgctcactggaagtaccgtcaatctaaggactttatggcagatggttatttgatgccaaaatataaagtgacaacgcctttgacccttgctttctttgcctttgtctttatctctcttttcttacaagaatccacctatatcggcgccattggagcaacgatttggattattatttttgggatttatagcaatgtcaaatttaaataa

SEQ ID NO: 1176 - protein, 459 aa, Streptococcus pyogenes
MSIKEQTDNNELENGMVRGLENRHVQLIAIAGTIGTGLFLGAGRSIALTGPSIIFVYMITGAFMFMMMRAIGEMLYYDPDQHTFINFISKYIGPGWGYFSGLSYWISLIFIGMAEITAVGAYVQFWFPSWPAWLIQLVFLVLLSSINLIAVRVFGETEFWFAMIKILAILALIATAIFMVLTGFETHTGHASLSNIFDHFSMFPNGKLKFFMAFQMVFFAYQAIEFVGITTSETANPRKVLPKAIQEIPTRIVIFYVGALVSIMAIVPWHQLPVDESPFVMVFKLIGIKWAAALINFVVLTSAASALNSTLYSTGRHLYQIANETPNALTNRLKINTLSRQGVPSRAIIASAVVVGISALINILPGVADAFSLITASSSGVYIAIYALTMIAHWKYRQSKDFMADGYLMPKYKVTTPLTLAFFAFVFISLFLQESTYIGAIGATIWIIIFGIYSNVKFK

SEQ ID NO: 1177 - DNA, 744 bp, Streptococcus pyogenes
atgattacaattagaaatttgagcaagacattctcagggcaaaaagttttagatagtttggctcttgatattgaaaaaggtcaagtgattgctttagttggtgcttcaggagcagggaaatcgaccttccttcgtagcctaaactatttggaaaaaccagattcaggctccattagcattggtgactttacggttgattttgagaccattaccacagagcaagtccttattttacgtcggaaacttgccatggtttttcaacaatttaatctttttgagcgtcgtacagcccttgagaatgtcaaagaaggtcttaaggtggtcaaaaaactgtctgaccaagaagcgactaaactggcgcaagcagaattggctaaggttggtttagcagatcgaaaacatcattacccacgtcatttatcagggggacaaaaacaacgggtagctttagcaagagctctggctatgaaaccagatgttttattactagatgagccgacctcggctcttgacccggaattagttggcgaagtggaaaagtctattactgatgctgctaaatccggacagaccatggttttagtgagtcacgacatgaattttgtttaccaagtggcagatagagtactctttttagatcaagggaaaatcttggaacaaggaacacctgaagaagtctttagacatcctcaaaaagaacgaaccaaagaattttttgcaagctattcaaaaacatacatttaa

SEQ ID NO: 1178 - protein, 247 aa, Streptococcus pyogenes
MITIRNLSKTFSGQKVLDSLALDIEKGQVIALVGASGAGKSTFLRSLNYLEKPDSGSISIGDFTVDFETITTEQVLILRRKLAMVFQQFNLFERRTALENVKEGLKVVKKLSDQEATKLAQAELAKVGLADRKHHYPRHLSGGQKQRVALARALAMKPDVLLLDEPTSALDPELVGEVEKSITDAAKSGQTMVLVSHDMNFVYQVADRVLFLDQGKILEQGTPEEVFRHPQKERTKEFFASYSKTYI

SEQ ID NO: 1179 - DNA, 1011 bp, Streptococcus pyogenes
atgtttttaacccttattgcagcaatcatatcctttatggtatccgctttcacaatgccttattttatcaaattctatcaattgaaaaaaattggtgggcaacaaatgcatgaagatgtcaagcaacatttagctaaagctggaacaccgactatggggggaactgtttttcttttagtagctacggcagtatcgttattggttagtctattttcgatcaaaaacactcaaagtttagctttgatttcaggcattttatcaattgttgtcatttacgggattatcggatttttggatgattttttaaaaatttttaagcaaatcaatgaaggattgacagccaaacaaaagttagccttgcagttggttggaggattgatgttctattttttacatgttagtccaagtggcatttcctctattaatgtgtttggttatcagctgccgctgggaattttctacctattctttgttttgttttgggtggttggtttttcaaatgccgttaatttgacagatggtatcgatggcttagcttctatctcagtggtgattagtctagtgacttacggcgttattgcctacgttcagagtcaatttgatgttttgttactgattggagcaatgattggagccttgcttggcttcttctgctttaatcacaaacctgctaaagtatttatgggagatgtaggtagtttagcccttggagctatgttggctgccatttctattgcgcttcgtcaagaatggactctcctgattattgggatcgtttatgttcttgaaacaagttctgtgatgttgcaagtgtcctatttcaagtacaccaagaaaaaatatggagaaggtcgtcgtatttttagaatgacgcctttccaccaccatttggaattgggaggcttgtctggtaaaggcaagaagtggtcagaatggcaggtagatgcttttttgtggggagtaggaagtctagctagtttactagttttagctatcttatacgtgttctaa

SEQ ID NO: 1180 - protein, 336 aa, Streptococcus pyogenes
MFLTLIAAIISFMVSAFTMPYFIKFYQLKKIGGQQMHEDVKQHLAKAGTPTMGGTVFLLVATAVSLLVSLFSIKNTQSLALISGILSIVVIYGIIGFLDDFLKIFKQINEGLTAKQKLALQLVGGLMFYFLHVSPSGISSINVFGYQLPLGIFYLFFVLFWVVGFSNAVNLTDGIDGLASISVVISLVTYGVIAYVQSQFDVLLLIGAMIGALLGFFCFNHKPAKVFMGDVGSLALGAMLAAISIALRQEWTLLIIGIVYVLETSSVMLQVSYFKYTKKKYGEGRRIFRMTPFHHHLELGGLSGKGKKWSEWQVDAFLWGVGSLASLLVLAILYVF

SEQ ID NO: 1181 - DNA, 324 bp, Streptococcus pyogenes
atgacaaatgaaaaaagaactcaggtagttacaaatgccttgcaaaaacgaataaaaactttctctagaattgagaaggctttttatactgctatcattgtaacagcgattacgatggcagtaagtattatttacctgcaaagtcgtaagttgcagctacaacaagaaatcactagtttaaatagtcatatttcggatcaaaaactagagcttaataatgccaagcaagaagtaaatgagttatctcgccgtgatcgtattatagatattgctggtaaagcaggcttaagcaaccgtaataataatatcaagaaagtcgagtaa

SEQ ID NO: 1182 - protein, 107 aa, Streptococcus pyogenes
MTNEKRTQVVTNALQKRIKTFSRIEKAFYTAIIVTAITMAVSIIYLQSRKLQLQQEITSLNSHISDQKLELNNAKQEVNELSRRDRIIDIAGKAGLSNRNNNIKKVE

SEQ ID NO: 1183 - DNA, 822 bp, Streptococcus pyogenes
atgatgaaacgacaatttgaagatgtaacacgtatcgtaattaaaattggcactagttcattagtgctaccaacaggtaaaattaatttagaaaaaatcgaccaactggcttttgtgatttcaagtttgatgaataagggcaaggaagttattttagtatcatcgggagcgatgggatttggactagatattttgaaaatggaaaaacgtccgaccaatcttgctaaacaacaggcagtttccagtgttggtcaggtagccatgatgagtctttattcacaaatttttgcatactaccaaaccaacgtgtcacaaattttattgacgagagatgtggtggttttcccagaaagtctagccaatgttaccaatgcttttgaaagtctgattagtttgggcattgtgccgattgttaatgaaaacgatgcggttagtgtggatgaaatggatcatgcgactaaatttggagataatgaccgtttatctgctgttgttgctggtattacaaaagctgatttattaatcatgttgtctgatattgatggcctttttgataaaaaccctactatttatgaggatgcgcagctacgcagccatgttgctaatattacgcaagaaatcattgcgtcagcaggtggtgcgggcagtaagtttggcacaggtgggatgctaagtaaggtgcagtctgctcagatggtatttgaaaacaaaggacagatggtcttgatgaatggagctaatcccagagatattttaagagtgcttgaagggcaaccactaggcacctggttcaagcagatagaagaggtaaggcatgactga

SEQ ID NO: 1184 - protein, 273 aa, Streptococcus pyogenes
MMKRQFEDVTRIVIKIGTSSLVLPTGKINLEKIDQLAFVISSLMNKGKEVILVSSGAMGFGLDILKMEKRPTNLAKQQAVSSVGQVAMMSLYSQIFAYYQTNVSQILLTRDVVVFPESLANVTNAFESLISLGIVPIVNENDAVSVDEMDHATKFGDNDRLSAVVAGITKADLLIMLSDIDGLFDKNPTIYEDAQLRSHVANITQEIIASAGGAGSKFGTGGMLSKVQSAQMVFENKGQMVLMNGANPRDILRVLEGQPLGTWFKQIEEVRHD

SEQ ID NO: 1185 - DNA, 1500 bp, Streptococcus pyogenes
atgaagattgaagacttaatggataaggaacgaagggcccaatatcgtctcttggtgaccctttatcatgctaaagaaacgttaaggctaaaagacctaatgaggctatcaaacttgtctaaagtgaccctattaaaatacattgacaatctaaatcatttgtgtcgagaacaaggtttagcctgtcaattacttttagaaaaagacagtctgagcttaaaagaaaatggccagttccattgggaggatttggtagctctgcttctcaaagaatcggttgcctatcagatattgacctacatgtactgccatgaacactttaacatcaccaacttatccgttgaactgatggttagtgaagctactctaaacagacaattagctcacctcaaccagcttttatcagaatttgatctggcgctctcgcaaggcagacaactgggaagtgagcttcagtggcgttatttctattttgaattgttccgccataccttgaccagacaaggcatagacgccttggtcaatcagttagacgcttcgcatttggctaccttaattgagcggctgattggccagtcattatcggcagaagccttagaacaattattgatttggttggcgatttcgcaagcgcgaatgtcctttcaaaaaagctacaatgatcattttttaagagatagtgactttatgacatctaatattttctttaagcgcttagaaagcatgcttttacattacttaagacgctatgcccttgaatttgatgcttttgaagctaagagcctctttgtctttttgcatgcttatcctctacttcctattgccagcatgaagtatagtttgggttttggaggtcctattgctgatcacatttcagaagccttatggcttttaaagaaggctcatgtgattatccatcagacaaaggaggaaatcatttatggcttggggatatttttttccaaagcttacttttttaaaggagctatccttagtcaaccaaccaatagccaatacctttatcaattagtaggcgaagataaaagagcgcttttaagggttatcataaaccatttagtgctgcaaatggatcaggaaacggatttcagtcagcagttgagtgacgacattttagcattgttgattttttccattgagcgccaccatgagcctcttttagtagggcttgccttggggcaaaataaggtggaagcagccattgcggaattggccattagacgtcatttggggcatcgtagggattttcaattaatgccctatgatcatcagaaagtttatgattgtctgattacctatcagactgtctgtttaccgagacaagatttaccctattaccggttaaaacagtatagctccccctatgaactcactgctttagaagcttttctcaaagaccttttccagcaaaaaaatacacgagaagaggaactctcactcagcccagcagctaagtctagttttgcacacaaaactgtgtga

SEQ ID NO: 1186 - protein, 499 aa, Streptococcus pyogenes
MKIEDLMDKERRAQYRLLVTLYHAKETLRLKDLMRLSNLSKVTLLKYIDNLNHLCREQGLACQLLLEKDSLSLKENGQFHWEDLVALLLKESVAYQILTYMYCHEHFNITNLSVELMVSEATLNRQLAHLNQLLSEFDLALSQGRQLGSELQWRYFYFELFRHTLTRQGIDALVNQLDASHLATLIERLIGQSLSAEALEQLLIWLAISQARMSFQKSYNDHFLRDSDFMTSNIFFKRLESMLLHYLRRYALEFDAFEAKSLFVFLHAYPLLPIASMKYSLGFGGPIADHISEALWLLKKAHVIIHQTKEEIIYGLGIFFSKAYFFKGAILSQPTNSQYLYQLVGEDKRALLRVIINHLVLQMDQETDFSQQLSDDILALLIFSIERHHEPLLVGLALGQNKVEAAIAELAIRRHLGHRRDFQLMPYDHQKVYDCLITYQTVCLPRQDLPYYRLKQYSSPYELTALEAFLKDLFQQKNTREEELSLSPAAKSSFAHKTV

SEQ ID NO: 1187 - DNA, 555 bp, Streptococcus pyogenes
ttgaaaataaggagccgtattgtgaccatctttttagtgatgttagctatgtttactattcgtttagtatttttgaagaaatcgataacaaatgaaaaagccatattagcccaaggaggacaggaatttggtgctcagaacacgaaatttttgacgttacttcacattatgatttatgtgtttgcggtgattgaagcgctgcttaaacaaattaagtttgatggcattagttttttaggtcttttgttgatgttattatcagtagctgttttatatgaagtgacacgtatcttaggtgacatttggactgtaaaattgatgttagcaaaagaccacaaatatgtggatcactggttgttcaaaacgattaaacatcctaactactttttaaatatcgcccctgagctggtgggcatagccttactttgccatgctaaaattacggctatgcttcttttcccatgctacattgtagtaatatatttacgtattcgagaagaaaacaagctattagcggaagtgattattccaaacggtactcgaacaaaaccttaa

SEQ ID NO: 1188 - protein, 184 aa, Streptococcus pyogenes
MKIRSRIVTIFLVMLAMFTIRLVFLKKSITNEKAILAQGGQEFGAQNTKFLTLLHIMIYVFAVIEALLKQIKFDGISFLGLLLMLLSVAVLYEVTRILGDIWTVKLMLAKDHKYVDHWLFKTIKHPNYFLNIAPELVGIALLCHAKITAMLLFPCYIVVIYLRIREENKLLAEVIIPNGTRTKP

SEQ ID NO: 1189 - DNA, 840 bp, Streptococcus pyogenes
atggtaacaacagtaaaaatgacaagtggctatgagattcccgttttaggatttggaacttaccaagcagccgatggtgaggaagcttaccaatctaccttagcagccatcaaggctggctatcgtcatattgatactgcagctatttataaaaatgaagaaagtgtgggtcgtgccatcaaggattctggggttctacgagaagacttatttattacaactaaactctggaatgacgcccatagttatgaaggggcaaaagacgctttagctgcttctcttgaccgtcttggtctggattatgtggatctctatcttatccattggccaaacccaaaagctctgcgtaacacttggaaagaggcaaatgcccaagcatggcaatatatggaagaggcggttgaagcagggcttattaaaagcattggcgtcagcaattttatggtgcatcatctagaagctcttcaagagacagctaaaataactccagcaattaatcagattcgattagccccaggttgctatcaaaaggaagtggttgattattgtaaggcaaatgagattttattggaagcttggagtcctctaggacaaggggagatttttgataatgagactatgcagcagttagctaataaatatgacaaaacagtggcacaagttgccttagcttggtcgctggcagaaggttttattcccttgccaaaatcggtgcatgatgagcgcatcaaggaaaatatggctatttttgatgtgagcttgacacaagaagataaaaaaacaattcgctatctctcaggaatgtcagcgattcctaaccctgatactacaagtttttaa

SEQ ID NO: 1190 - protein, 279 aa, Streptococcus pyogenes
MVTTVKMTSGYEIPVLGFGTYQAADGEEAYQSTLAAIKAGYRHIDTAAIYKNEESVGRAIKDSGVLREDLFITTKLWNDAHSYEGAKDALAASLDRLGLDYVDLYLIHWPNPKALRNTWKEANAQAWQYMEEAVEAGLIKSIGVSNFMVHHLEALQETAKITPAINQIRLAPGCYQKEVVDYCKANEILLEAWSPLGQGEIFDNETMQQLANKYDKTVAQVALAWSLAEGFIPLPKSVHDERIKENMAIFDVSLTQEDKKTIRYLSGMSAIPNPDTTSF

SEQ ID NO: 1191 - DNA, 558 bp, Streptococcus pyogenes
atgactgataaagcactctcaaaaagatcacttcaaaacttaacacaatttaataaagaaacacgacgcatagcacgtgaatctatggaaatcgccttactaaatcttctagaaacaaaacctttaggtgatattacgatttcagaattggtgacgaaagcaggagtatctcgtaacgctttttatcgtaattatacctctaaagaagccattatagaacaactgttagtaggggttatccgtcgtatttttcgtggactaaaacaatttgatattaaaactcaggcttatcaagcttggctctatctttttactgaagctaaaaaagaagctcagcttcttaaaatgattttcaaacatcacctgcaccatcttctaacacgattagtcactaaacgtctgaaagcttatcaaaaattaaaagacaaaaaacaatcgcactataagcgccttttttggagcaatgctattgtttctgtcttgacaaactggatttcagatgacatgatcgttcctgccgaagaaatggctgctatgggcttgcctctattaacgtaa

SEQ ID NO: 1192 - protein, 185 aa, Streptococcus pyogenes
MTDKALSKRSLQNLTQFNKETRRIARESMEIALLNLLETKPLGDITISELVTKAGVSRNAFYRNYTSKEAIIEQLLVGVIRRIFRGLKQFDIKTQAYQAWLYLFTEAKKEAQLLKMIFKHHLHHLLTRLVTKRLKAYQKLKDKKQSHYKRLFWSNAIVSVLTNWISDDMIVPAEEMAAMGLPLLT

SEQ ID NO: 1193 - DNA, 825 bp, Streptococcus pyogenes
atgattcaactaattgcaattgatttggacggcaccttattaaaccaggacaaacagattccaaaagagaatatcacagccatccaagaagcagctcagtcaggcttaaaaattgtcttatgcacaggccggcctcagtcagggacaagaccctattttgaccaattaggtttgacacaagaggaattcctcattatcaataatggctgtagtacttatagtagtcctgactggcaattacgccattcaaaaatgttgaaggtttcagatattgaattgctggaagagctaagccaaagttttccagatatttacctgactttaactgaggaaaacgattatttggtgcttgaagaagaagtgccagaccttgtgcaggaagatggagatttggtatttaccattgtcaagcctgtctccttagcagagctgtcggacactcctcgcctgatttttcaagccatgtacttaggagaaaaagctgcgctagatgcctttgaacgtgcggtgagaaatcagcttagtcagagttttcatgttgttcgtagccaagataatattttagaaattctccctcagggagtcagcaaggcatcggctctcaaagaattagtagaagatttgggtttaactgctgaccaagtgatggctattggggatgctcccaatgacattgagatgttaacttatgctggtttaggagttgctatggaaaatgcttcagcagctatcaagccattagctgacaaagtcactttgactaatgatatggcgggtgtggcccaggctatccgtcagtttgcacttgtagctcaaaaagactaa

SEQ ID NO: 1194 - protein, 274 aa, Streptococcus pyogenes
MIQLIAIDLDGTLLNQDKQIPKENITAIQEAAQSGLKIVLCTGRPQSGTRPYFDQLGLTQEEFLIINNGCSTYSSPDWQLRHSKMLKVSDIELLEELSQSFPDIYLTLTEENDYLVLEEEVPDLVQEDGDLVFTIVKPVSLAELSDTPRLIFQAMYLGEKAALDAFERAVRNQLSQSFHVVRSQDNILEILPQGVSKASALKELVEDLGLTADQVMAIGDAPNDIEMLTYAGLGVAMENASAAIKPLADKVTLTNDMAGVAQAIRQFALVAQKD

SEQ ID NO: 1195 - DNA, 606 bp, Streptococcus pyogenes
atgtgggaaattttaaatatcatcgggaccattgcctttgctctttctggtgctattgttgccatggaagaagaatttgatattttagggatttttattttaggtttcgtgacagcctttggaggcggagccattcgaaacaccctaattggtttacctatagaggccttatgggggcaaaagccagaattcacttgcgctttctttgctatggttttgattatgctttttcctaagctaatggctagaggttgggtacgggcagctgttttgactgatgccattggtctggcagcttttagtgtccaaggagccttgcatgctgtccgtcttaaccagcctttaagtgctgtcattgtaacagctgtgttgactggtgcaggcggtggtgttgtcagagatattctggcagggcgaaaacctagtgttttgcgtagtgaaatctatgctgggtggtctattcttgcagctattgttttgcattttaaactagcagattcaacgattgaatgttatgccttggttgttttactcacgactttacgcatgattggcaaccgtaaaaaatggaacctccctaaaatcaaatggaaagaggaaagatag

SEQ ID NO: 1196 - protein, 201 aa, Streptococcus pyogenes
MWEILNIIGTIAFALSGAIVAMEEEFDILGIFILGFVTAFGGGAIRNTLIGLPIEALWGQKPEFTCAFFAMVLIMLFPKLMARGWVRAAVLTDAIGLAAFSVQGALHAVRLNQPLSAVIVTAVLTGAGGGVVRDILAGRKPSVLRSEIYAGWSILAAIVLHFKLADSTIECYALVVLLTTLRMIGNRKKWNLPKIKWKEER

SEQ ID NO: 1197 - DNA, 516 bp, Streptococcus pyogenes
atgaaaattgcgattggttgtgaccatattgtcaccaacgaaaaaatggctgtttctgattttttgaaatctaaaggctatgacgttattgactgtggcacttatgaccatacaagaacccattaccctatttttggaaaaaaagtcggcgaagctgtggttaatggtcaagcagacttgggtgtttgtatttgtggaactggagttggcattaataatgccgtgaacaaggtaccaggtattcgttcagcccttgttcgagatatgacaacagcgctttatgccaaggaagaattgaatgccaatgtgattggctttggtggtaaaatcacgggtgaacttcttatgtgtgatattatagatgcttttatcaaggcagaatacaaagaaactgaagagaataagaagctaattgctaaaatagcccacttggaaagtcatcatgccaaccaagaagatcctgatttttttacagaatttttggaaaaatgggatcgtggtgagtatcacgattag

SEQ ID NO: 1198 - protein, 171 aa, Streptococcus pyogenes
MKIAIGCDHIVTNEKMAVSDFLKSKGYDVIDCGTYDHTRTHYPIFGKKVGEAVVNGQADLGVCICGTGVGINNAVNKVPGIRSALVRDMTTALYAKEELNANVIGFGGKITGELLMCDIIDAFIKAEYKETEENKKLIAKIAHLESHHANQEDPDFFTEFLEKWDRGEYHD

SEQ ID NO: 1199 - DNA, 1449 bp, Streptococcus pyogenes
atgcaaccttttttagacattattaacaagattctgggatttcctattcagttgggatcaggtgtggtcatgctgattgtcatgacaggtttagccatgattttcggggttaaattcacaaaggcactggaaggtgggattaagttagccatcgctttgacagggattggagccattattggaattttgacgggggctttttcagagtctttacaggcctttgttaaaaatacagggatcagtttaaacattattgatgtcggttgggcaccgcttgcaacaattacctggggttccccttacaccctttatttcttgctggtgatgctggtggttaatattgtcatgattgtcatgaaaaaaacggacacccttgacgtcgatatttttgatatttggcatttgtccattacgggtctattgattatgtggtatgcggctcgtaaccatttaccagtctttgtgtctcttttgattgctactgtggcagttattcttgttggggtactgaaaatcattaactctgatttgatgaaaccgacctttgatgaccttcttgggacagggcctcaatcaccaatgacttcaactcacatgaactacatgatgaatccaatcattatggtcttagataagatttttgacaaggtctttccggggctggataaatatgactttgatgctgctaaattgaacaaaaaaattggcttctggggctctaagttctttatcggaatggctctaggttttgtgattgggattatgggagatcctcatttcactgttgaatctatcaaaaattggtttggcctaggctttaccgcgggtgcctgcttggaacttttctctttgattggctcttggtttatcgcagctgttgagcctttgtcacaagggattaccaattttgccaatgctagaatgcatgggcgtcgtttcaatatcggtttggactggcccttcattgctggtcgtgctgaaatctgggcctgtgccaatattcttgccccaatcatgttgattgaagccgttctcctatcaaaagttggcaatgggattttaccactggcaggaattattgctatggggatgacaccagctcttcttgtggtcacacgtggtcgtttgattcgcatgattatttttggttccctcttattgccattattcctcttgtcaggaactatgattgctccatttgcgacagagttggctaaaaaagtaggggcttttccagcaggtacaagcgctggttccttgattacgcattcaacacttgaaggaccaatggaaaaaatttttggttatgtgattggtcaagcgacaacaggtcagattgcctcaatcatcacgctaatcatctttgtggccatttacctaagtctctttgcttggtatgctaaccaaatgaaggcacgtaacgctgaatatgcgaaaacaatgaaataa

SEQ ID NO: 1200 - protein, 482 aa, Streptococcus pyogenes
MQPFLDIINKILGFPIQLGSGVVMLIVMTGLAMIFGVKFTKALEGGIKLAIALTGIGAIIGILTGAFSESLQAFVKNTGISLNIIDVGWAPLATITWGSPYTLYFLLVMLVVNIVMIVMKKTDTLDVDIFDIWHLSITGLLIMWYAARNHLPVFVSLLIATVAVILVGVLKIINSDLMKPTFDDLLGTGPQSPMTSTHMNYMMNPIIMVLDKIFDKVFPGLDKYDFDAAKLNKKIGFWGSKFFIGMALGFVIGIMGDPHFTVESIKNWFGLGFTAGACLELFSLIGSWFIAAVEPLSQGITNFANARMHGRRFNIGLDWPFIAGRAEIWACANILAPIMLIEAVLLSKVGNGILPLAGIIAMGMTPALLVVTRGRLIRMIIFGSLLLPLFLLSGTMIAPFATELAKKVGAFPAGTSAGSLITHSTLEGPMEKIFGYVIGQATTGQIASIITLIIFVAIYLSLFAWYANQMKARNAEYAKTMK

SEQ ID NO: 1201 - DNA, 2202 bp, Streptococcus pyogenes
atgagttgtgcctcttgtgctctaacaattgaaaaaacagtcaatcaattgcctgaagtagaacaggctgttgtgaatttagcgactgagaagctcacggttacttatcaagatgacgatttagaaacggccaaagttattcaagcggtgaaagctgctggttatggtgcacaagtctttgatgaacatgcaaaacacatgcaaacaggtcgtcgtgacgaagacctaaaggttatttggtctcaggtcttgtggtctgccctattcaccattcctatattatacctagctatgggtcacatggtgggcttatggcttcctccatttctgcaaccagatcgctatcctttcgtttacagctttagtcagctactcttgacgattccagtcttagtattaaatcgtcattattaccataatgggtttaaagctttgtttaagggacatcctaatatggactccttggtagctttagcaaccagctttgcttttgcttatagtctttatggagtggttgaaatcagtctgggccgggcgcactttgtgcactccctttattttgaatcggtggtagtgattttgacactcatcggtctaggaaagtattttgaaagtcgttctaagggccgtacttctcaagctattcaaaagctcctatccttgaaggctactgttgtgagggtatggagaaacagccaatggcaattgttaccattagaagaagttagctatgatgaccttgtcctggttcaaccaggtgaaaaagtttctattgacggtattatcgtggaaggacatagcagtttggatgaatcctttttaaccggggaaagtttgcctgttgaaaagggagaaaaagataatgtctttgcgggcagcttgaatgggccaggcgccctcacgattaaaccagataagcttggaaatgataccttgttagcacaaattatccaactagttgagaatgctcaagaaaataaagcacctattgcagctattgctgatagagtctcaggtgtctttgttccggtggttttggtattagctctgttaacaggggtgttttggttggtattcatgcaggaaagtcttcgttttagtttgacaacagccatcgctgttctagtcattgcttgcccttgtgcgcttggtttagcaacgccgacagcgattatggttggaacagggcgtgcagctgaaaatggtattctttttaaaggtggtgacatcttagaacaagcacatcaggtagatacggttgtttttgataaaacggggacgattacggaggggaaaccaagtcttcaaaagctcctaactttttcgggagatgatcaccttatcttgcaagaagctgcttccttggaggcctattctcaacaccccttaggggaggctattgttcgtgctgctcaggaagctggttacgatagtctaccagtggaagagtttgagtctttaaccggcctaggagttactggtcagcttgaagggcgtcgtttggcgattggaaatgctgctttaatgggaattcttggtatcgatttatcttgtgttcagtcggtttgtgctaaggcttctgagaaaggccaaacccttgtatattatgctaaagaggggcagctacgagctcttttcagtattgctgacgctgtcaaagaagatagtcaagctaccgtcgaagctttgcatcaactgggaattcacaccatcatgctaacaggtgaccacgatgctaccgctaaggctattgcctctcaagtggggattacagatgtgatcagtcaagtcttacctgatcaaaaagcaggcgtgatagcagacctccgctctcaagggagaaaagttgcaatggtaggtgatggtattaatgatgctccggcattggctgtagcagacattgggatagctatggggtcagggacagatattgccattgaatcggcggatgtgattctgatgaaacctgatatgctggatttggtgaaagctatgtcattgagtcgagtgactatgagaattgtcaaggaaaatttattttgggcattcatttacaatgtcctcatgattccagtggccatgggcttacttcatctttttggaggtccactattgaacccgatgttagcaggttttgccatgagttttagttcagtatcagttgttttgaatgccctgcgattaaaaggaaaaaccatttaa

SEQ ID NO: 1202 - protein, 733 aa, Streptococcus pyogenes
MSCASCALTIEKTVNQLPEVEQAVVNLATEKLTVTYQDDDLETAKVIQAVKAAGYGAQVFDEHAKHMQTGRRDEDLKVIWSQVLWSALFTIPILYLAMGHMVGLWLPPFLQPDRYPFVYSFSQLLLTIPVLVLNRHYYHNGFKALFKGHPNMDSLVALATSFAFAYSLYGVVEISLGRAHFVHSLYFESVVVILTLIGLGKYFESRSKGRTSQAIQKLLSLKATVVRVWRNSQWQLLPLEEVSYDDLVLVQPGEKVSIDGIIVEGHSSLDESFLTGESLPVEKGEKDNVFAGSLNGPGALTIKPDKLGNDTLLAQIIQLVENAQENKAPIAAIADRVSGVFVPVVLVLALLTGVFWLVFMQESLRFSLTTAIAVLVIACPCALGLATPTAIMVGTGRAAENGILFKGGDILEQAHQVDTVVFDKTGTITEGKPSLQKLLTFSGDDHLILQEAASLEAYSQHPLGEAIVRAAQEAGYDSLPVEEFESLTGLGVTGQLEGRRLAIGNAALMGILGIDLSCVQSVCAKASEKGQTLVYYAKEGQLRALFSIADAVKEDSQATVEALHQLGIHTIMLTGDHDATAKAIASQVGITDVISQVLPDQKAGVIADLRSQGRKVAMVGDGINDAPALAVADIGIAMGSGTDIAIESADVILMKPDMLDLVKAMSLSRVTMRIVKENLFWAFIYNVLMIPVAMGLLHLFGGPLLNPMLAGFAMSFSSVSVVLNALRLKGKTI

SEQ ID NO: 1203 - DNA, 435 bp, Streptococcus pyogenes
atgcaacagatatcagctgctgaatgggaagtcatgcgtgtggtgtgggccagtggtgatattaaaagtagcgatattattactattttaaggaaaaaatatcaatggtcagattccactattaagaccctcattggtaggctagttaaaaaaaattttttaacgtcttatcggcaaggaagagcttatatttatcaagctcttttggatgagactttgctacaaaaagaagcactagcgactgttttagacggtatttgtcagcggcaacacacgcgtctacttcttgaacggctttatcacttaccgatgaccttagaggaaatcggggcattccaagagctactagaagtcaaaaaagaaaatgcagttcttgaggtgccgtgtaattgtctgcctgggcagtgccactgtcagagaaaggagacgtattaa

SEQ ID NO: 1204 - protein, 144 aa, Streptococcus pyogenes
MQQISAAEWEVMRVVWASGDIKSSDIITILRKKYQWSDSTIKTLIGRLVKKNFLTSYRQGRAYIYQALLDETLLQKEALATVLDGICQRQHTRLLLERLYHLPMTLEEIGAFQELLEVKKENAVLEVPCNCLPGQCHCQRKETY

SEQ ID NO: 1205 - DNA, 297 bp, Streptococcus pyogenes
atgtctaaagtcaaaaaaatacctttacgaaaatcacttgtttctggtgaaattattgctaaacgagatcttcttaggattgtaaaaactaaggatggtcaagttttcattgatccaactggtaaacaaaatggtcgtggtgcttatatcaaattagacaatcaagaggccttaatggccaagaaaaaacaagttttcaacaggagtttctcaatggacattccagaaagtttttacgatgacttgattgcttatgttgatcacaaaatcaaaagaagagagttaggtcttgactaa

SEQ ID NO: 1206 - protein, 98 aa, Streptococcus pyogenes
MSKVKKIPLRKSLVSGEIIAKRDLLRIVKTKDGQVFIDPTGKQNGRGAYIKLDNQEALMAKKKQVFNRSFSMDIPESFYDDLIAYVDHKIKRRELGLD

SEQ ID NO: 1207 - DNA, 1158 bp, Streptococcus pyogenes
atgagcaaagaaatgctagaagccttccgtattttggaagaagaaaaacacattgataaagcagatattattgacgcagtgacagaatcattaaagtctgcctataaacgtcgctatggtcaatcagaatcatgtgttattgaatttaatgaaaaaacagctgattttcaagtatttacggttcgtgaggttgttgaagaagtttttgacagccggcttgagattagtttgaaagatgctcttgctatcagttctgcctatgaattgggtgataagattcgctttgaagaatctgtcaatgaatttggacgtgtcgcagctcaatcagctaaacagactattatggaaaagatgcgccgccaaatgcgtgaagtgatgttcaatgaatacaaagagcatgaaggtgaaattatgacaggaacagttgaacggtttgatcaacgttttatttatgtcaatcttggttccttagaagcacaattgtctcaccaagaccagattccaggtgaaactttcaaatcacatgaccgtattgacgtttatgtctacaaagttgaaaataatcctaaaggagttaacgtctttgttagtcgtagccatccagaattcatcaaacgtattatggagcaagaaattcctgaagtctttgatggtactgttgaaatcatgagtgtttctcgtgaagcaggtgaccgcaccaaggttgctgtgcgcagtcataatcctaacgttgatgccatcggaacaattgttggacgtggtggaagtaatattaaaaaggtcatcagcaagttccatccaaaacgtgtagatgctaagacggggcttgaaattccagttgaagaaaatattgacgtgattcaatgggtagatgatccagctgagttcatctacaatgccattgctccggctgaagtagacatggtactttttgacgatgaagatcttaaacgtgctacggtagtagttcctgatagcaaattatcattagctatcgggcgtcgcggccaaaatgttcgtttagcggcacatttgactggctaccgtattgatatcaaatcagctagcgaatatgatcgtcttgaggcggaaaaagaagcagcaacagctgtggaagagccagttgttgacgatgttatgactgccgaggaagtataa

SEQ ID NO: 1208 - protein, 385 aa, Streptococcus pyogenes
MSKEMLEAFRILEEEKHIDKADIIDAVTESLKSAYKRRYGQSESCVIEFNEKTADFQVFTVREVVEEVFDSRLEISLKDALAISSAYELGDKIRFEESVNEFGRVAAQSAKQTIMEKMRRQMREVMFNEYKEHEGEIMTGTVERFDQRFIYVNLGSLEAQLSHQDQIPGETFKSHDRIDVYVYKVENNPKGVNVFVSRSHPEFIKRIMEQEIPEVFDGTVEIMSVSREAGDRTKVAVRSHNPNVDAIGTIVGRGGSNIKKVISKFHPKRVDAKTGLEIPVEENIDVIQWVDDPAEFIYNAIAPAEVDMVLFDDEDLKRATVVVPDSKLSLAIGRRGQNVRLAAHLTGYRIDIKSASEYDRLEAEKEAATAVEEPVVDDVMTAEEV

SEQ ID NO: 1209 - DNA, 384 bp, Streptococcus pyogenes
atgggtagtgactacatccttagtattttagtcgataaggaaggtggaatcacagtggaagatacatctgacttgacgaatattattagtccgctgttagatacgattgatccagatccttttccaaaccaatatatgctagaagtctctagtccaggtttggagcgtccgctcaagacagctgacagtttaaaagcagcagttggctcttatatcaatgtgagtctttatcaagctattgataaggtgaaagtttttcaaggagacttattagcctttgatggtgaaacgttgaccattgattatcttgataaaacacgtcataagatcgtgaatataccatatcaagcagttgctaaggtgagaatggctgtcaaattataa

SEQ ID NO: 1210 - protein, 127 aa, Streptococcus pyogenes
MGSDYILSILVDKEGGITVEDTSDLTNIISPLLDTIDPDPFPNQYMLEVSSPGLERPLKTADSLKAAVGSYINVSLYQAIDKVKVFQGDLLAFDGETLTIDYLDKTRHKIVNIPYQAVAKVRMAVKL

SEQ ID NO: 1211 - DNA, 1365 bp, Streptococcus pyogenes
atgtttaaaaaaatcttaattgctaatcgtggtgaaattgcagtgcgtatcattcgtgctgcacgagaattagggatttccacagttgcagtttattcggaagcggataaggaagctctgcacacgatcttggcggacgaggctatctgtattggtcctgcccgttccaaggaatcctatcttaatatgaattccgtcttgtcagcagctattgtgacaggagcccaagcgattcacccagggtttggctttttaagtgaaaactcaaagtttgcgaccatgtgtgaagagatgaatattaaatttatcggtccatccgcatcggttatggataaaatgggtgataaaatcaatgctcgttctgaaatgattaaggcaggagtgcccgttattccagggtcagatggtgaagtttataacgctcaagaagccttagctattgccaataagattggttatcctgtcatgctaaaagcatcggcaggtggtggaggtaaagggattcgtaaagtggagacagaagcagatttggaggcggctttcaatgctgccagtcaagaagctttgggagctttcggaaatggcgccatgtatttggaaaaagtaatttatccagctagacatattgaggtgcaaattttaggagacgcttacggtaacatcattcacttgggagaacgggattgctccttgcaacggaataatcaaaaagtcttggaagaaagtccatccattgctattggcaataccctcagacacgaaatggggcaagcagcggttagagcagctgaagctgtagcctatgaaaatgcgggaaccattgagtttttgttggacgaagacagcgagaaattctatttcatggaaatgaatacccgtatccaagttgagcatcctgtcaccgaatttgtgacaggagtggatattgtcaaagagcaaatcaaaattgcagcaggtcagcctttggcgattaatcaagaagacatcactatcacgggacatgctattgaatgtcgtatcaatgctgaaaatactgcttttaactttgcaccgagtccaggaaagattacagacttgtatatgccaagtggtggtgtaggactacgagttgattcagcagtttacaatggctatgccattcctccttattatgacagcatgattgctaaaatcatcgttcatggaagcaatcgatttgacgctttgatgaaaatgcaacgtgccttagttgaattggaaattgaaggcattatcaccaatacagacttccagctcgatttgatttcagataagcgagtgattgcaggagattatgatacctctttcttgatggaaacgttcctgccacattacaataaagattag

SEQ ID NO: 1212 - protein, 454 aa, Streptococcus pyogenes
MFKKILIANRGEIAVRIIRAARELGISTVAVYSEADKEALHTILADEAICIGPARSKESYLNMNSVLSAAIVTGAQAIHPGFGFLSENSKFATMCEEMNIKFIGPSASVMDKMGDKINARSEMIKAGVPVIPGSDGEVYNAQEALAIANKIGYPVMLKASAGGGGKGIRKVETEADLEAAFNAASQEALGAFGNGAMYLEKVIYPARHIEVQILGDAYGNIIHLGERDCSLQRNNQKVLEESPSIAIGNTLRHEMGQAAVRAAEAVAYENAGTIEFLLDEDSEKFYFMEMNTRIQVEHPVTEFVTGVDIVKEQIKIAAGQPLAINQEDITITGHAIECRINAENTAFNFAPSPGKITDLYMPSGGVGLRVDSAVYNGYAIPPYYDSMIAKIIVHGSNRFDALMKMQRALVELEIEGIITNTDFQLDLISDKRVIAGDYDTSFLMETFLPHYNKD

SEQ ID NO: 1213 - DNA, 420 bp, Streptococcus pyogenes
atggatattagagaaattcaagcggctttgcctcatcgctacccaatgttattggttgatcgtgtgttagaagtgtcagacgaccatatcgttgccattaaaaatgtgactattaatgagcctttctttaacgggcattttcctcactatcctgtgatgccaggtgttctgattatggaagctttggctcaaacagctggtgtcttagaattgtcaaaagaagaaaataaaggcaagttggtcttttacgctggaatggataaagtgaagttcaaaaaacaagtcgtccctggtgatcaacttgtgatgacagcaacctttatcaagcgtcgcggtaccattgctgtcgttgaagccagggcagaagttgatggcaagctagcagcaagtggaacattaacctttgcctgtgggcaatga

SEQ ID NO: 1214 - protein, 139 aa, Streptococcus pyogenes
MDIREIQAALPHRYPMLLVDRVLEVSDDHIVAIKNVTINEPFFNGHFPHYPVMPGVLIMEALAQTAGVLELSKEENKGKLVFYAGMDKVKFKKQVVPGDQLVMTATFIKRRGTIAVVEARAEVDGKLAASGTLTFACGQ

SEQ ID NO: 1215 - DNA, 939 bp, Streptococcus pyogenes
atgacaaagacagcctttttatttgccggtcaaggtgctcaaaaattagggatggcaagggatttttatgataactttgctattgtaagaaaaacctttgatcaagctagtcaagtattgggatacgatttgcgccgtttgattgatagtgacgagttaaaacttaatcaaactagctatacgcaaccagctattttgacatcatcaattgctatttaccgtgttttgggcttacatcacgttaaaccggatatggtagctggtctttccttaggagaatactcagctttggtagcatcaggggcactctcttttgaagataccctatccttagtagctaagagaggccgcttgatggaggaagcagcaccacaaggatctggaaagatggttgccgttatgaatacagacgtgcaagtcatcgaagaagtctgtcaaatagctgctaaacatggagtggttgctccagcaaactataatactcctagtcaaattgtaattggtggtcagacagatgctgtgaacgtggcagttgaacttttaaaggaaaggggagttaagcgtttaatccctttaaacgtgtcaggtcctttccacactgctttgttagaaccagctagccgcttgttggctaaagagttggaaagatacaacttcagtgacttcaagattcctttggttggtaataccgaagctaatattatggaaaaagaccgtatcccagaactattagcccgtcaagtcatggagcctgttcgtttttatgacagtgttgcgactttagtagaaagtggcataacacaattcattgaggtaggaccaggtaaggttttgacaggttttgtgaagaaaattgataaaaatttactatgtactagtgttgaaaacatggtaagcttacgtttatttttagatagagaggacattcatggaaattaa

SEQ ID NO: 1216 - protein, 312 aa, Streptococcus pyogenes
MTKTAFLFAGQGAQKLGMARDFYDNFAIVRKTFDQASQVLGYDLRRLIDSDELKLNQTSYTQPAILTSSIAIYRVLGLHHVKPDMVAGLSLGEYSALVASGALSFEDTLSLVAKRGRLMEEAAPQGSGKMVAVMNTDVQVIEEVCQIAAKHGVVAPANYNTPSQIVIGGQTDAVNVAVELLKERGVKRLIPLNVSGPFHTALLEPASRLLAKELERYNFSDFKIPLVGNTEANIMEKDRIPELLARQVMEPVRFYDSVATLVESGITQFIEVGPGKVLTGFVKKIDKNLLCTSVENMVSLRLFLDREDIHGN

SEQ ID NO: 1217 - DNA, 1137 bp, Streptococcus pyogenes
atgaacaatacagaatattacgatcgtctgggggtttctaaggacgcttctcaggacgatatcaaaaaagcttatcgaaaaatgtctaaaaaatatcatccagatatcaataaagaagctggagcggagcaaaagtataaggatgttcaagaagcttacgaaaccttaagtgattcacaaaagcgtgctgcttatgatcaatacggcgctgcaggtgctcaaggcggctttggtggcggagcaggcggctttggtggttttgacggaggtggctttggtggttttgaagatatcttctcaagcttctttggtggcggtggaagccgaaacccaaatgcccctcgtcaaggtgacgatttgcaatatcgtgttaatttatcttttgaagaggctgtatttggtgttgaaaaagaagttagctataatcgcgaagcaacctgcggcacttgtttaggctcaggtgcaaaacctggtaccgctccagtaacttgtcgtaagtgccatggttcaggtgtaatgacaattgacacccaaacaccacttggtatgatgcgtcgacaagtcacctgcgatatttgtcatggtagtggtaaggaaattaaagaaccctgtcaaacctgtcacggtactggtcatgaaaagcaagctcataaagtgtctgttaagattccagctggtgtagagactggtcagcaaatccgtttacaaggtcaaggagaagctggctttaatggcggaccttatggtgatttatttgttattttgaatgtcttaccaagtaagcaatttgaacgcaatggttccactatttactacaacttagatatttcttttactcaagcagccttaggagatactgttgaaattccaacggttcatggcgatgttgagatggctatccctgctgggacacaaacaggtaaaaccttccgcctcaaaggcaaaggagcaccaaaactccgtggtggaggtcaaggggatcaacatgttaccgttaatattgtgaccccaaccaaactcaatgacgctcaaagggaagccttgcaagcatttgcagaagcgagtggtgaaaaaatgttacatccaaagaaaaaaggtttttttgataaagtgaaagatgccttagaggatatttaa

SEQ ID NO: 1218 - protein, 378 aa, Streptococcus pyogenes
MNNTEYYDRLGVSKDASQDDIKKAYRKMSKKYHPDINKEAGAEQKYKDVQEAYETLSDSQKRAAYDQYGAAGAQGGFGGGAGGFGGFDGGGFGGFEDIFSSFFGGGGSRNPNAPRQGDDLQYRVNLSFEEAVFGVEKEVSYNREATCGTCLGSGAKPGTAPVTCRKCHGSGVMTIDTQTPLGMMRRQVTCDICHGSGKEIKEPCQTCHGTGHEKQAHKVSVKIPAGVETGQQIRLQGQGEAGFNGGPYGDLFVILNVLPSKQFERNGSTIYYNLDISFTQAALGDTVEIPTVHGDVEMAIPAGTQTGKTFRLKGKGAPKLRGGGQGDQHVTVNIVTPTKLNDAQREALQAFAEASGEKMLHPKKKGFFDKVKDALEDI

SEQ ID NO: 1219 - DNA, 240 bp, Streptococcus pyogenes
atgatatggtctttaattgtaggtgcctttatcggcatgatagcaggtaaaatgactgaaaaaagccagtccatgggttgttttactaatattatcgcaggtctcatagggtcagctgttgggcaaaggctttttggggattggggaattcagttggcaggtatggctattttcccgtccattttgggagcagcaattgtaattgtacttgtttcagctatttttggaaaaaggtattaa

SEQ ID NO: 1220 - protein, 79 aa, Streptococcus pyogenes
MIWSLIVGAFIGMIAGKMTEKSQSMGCFTNIIAGLIGSAVGQRLFGDWGIQLAGMAIFPSILGAAIVIVLVSAIFGKRY

SEQ ID NO: 1221 - DNA, 303 bp, Streptococcus pyogenes
atgaaaatttctgaagaagaagttcgccatgtcgcgaagctatcaaaattatcattttcagaaagtgagacaacaacctttgcaacgaccttatccaaaatcgttgatatggttgaattgctgaacgaagttgataccgaaggtgtcgccattacaacaaccatggcagataagaaaaatgtgatgcgtcaagatgtcgctgaagaaggaacagaccgtgccttgctctttaaaaatgttcctgaaaaagaaaatcactttatcaaggtacctgctattttggatgacggaggagatgcctaa

SEQ ID NO: 1222 - protein, 100 aa, Streptococcus pyogenes
MKISEEEVRHVAKLSKLSFSESETTTFATTLSKIVDMVELLNEVDTEGVAITTTMADKKNVMRQDVAEEGTDRALLFKNVPEKENHFIKVPAILDDGGDA

SEQ ID NO: 1223 - DNA, 555 bp, Streptococcus pyogenes
atgagagcattgatttcaattgattacacaaatgattttgtagcagatgatggtaaattaagtgcaggtaaatctgctcaggctattgccactaaaatagcagaggtaactaaaacggcatttgatcaaggagactatattttttttgctattgattgtcatgatcaaaatgattcttggcatcctgagagtaagctatttgcagcacataatatcaaaggaactactggacgccatctttatggtccactagctgaagtttacagttatatgaagcaacatcccagagttttttggattgataagcgttattattcagctttttcggggactgatttagatattagactacgagaaagaggtatcactcaattagtgttaacaggagttttatctgatatctgtgtcttacatactgctattgacgcttatcatcttggttatcaattagagattgttaaatcggctgtcgctagccttacaaaagaatcttatgagtggtctttggctcactttgagcaggttcttggtgctaagcttattaacgattactaa

SEQ ID NO: 1224 - protein, 184 aa, Streptococcus pyogenes
MRALISIDYTNDFVADDGKLSAGKSAQAIATKIAEVTKTAFDQGDYIFFAIDCHDQNDSWHPESKLFAAHNIKGTTGRHLYGPLAEVYSYMKQHPRVFWIDKRYYSAFSGTDLDIRLRERGITQLVLTGVLSDICVLHTAIDAYHLGYQLEIVKSAVASLTKESYEWSLAHFEQVLGAKLINDY

SEQ ID NO: 1225 - DNA, 1215 bp, Streptococcus pyogenes
atgaaaattattgaaaaatcatcaaaattagaacatgttgcctatgatattcgagggcctgttttggatgaagctaatcgcatgattgcgagtggtgaaaaaattctgcgtttaaatactggcaatcctgctgcttttggttttgaagcaccagatgaagtgattcgtgatttaattgtcaacgcgaggctaagtgagggctattctgacagtaaagggattttttcagcgcgtaaggctatcatgcagtattgccaactcaagggcttcccagatgttgacattgaagatatttatttgggaaatggcgtgtcagagttgatatccatatcccttcaagctttgctagataatggcgatgaagttttagtaccaatgccggattatcctttatggacggcttgtgtgagtcttggtggaggaaaagcggtccattatctttgtgatgaagaagctggttggtatcctgatattgctgatatcaaatcaaaaatcacgagtcgcaccaaagctattgtggtcatcaatcctaataacccaacaggagccctttatcctaaggagattttagaagacatcgttgctttggcaagagaacaccagctgattatttttgccgatgaaatctatgatcgtttggtgatggatggtaaagagcatattgctattgcaagtttggcacctgatgttttttgtgtatctatgaatggtctttccaaatctcatcgtattgctggttttcgtgttggatggatggtcttatcaggtcctaaagaccatgttaaaggttacattgaagggttaaacatgcttgccaatatgcggttatgctccaatgttttagcccaacaagttgttcaaacttccttaggaggtcatcaatcagttgatgcactgttactgccaggagggcgtatttttgagcaacgtaattttatttatgaagctattaatgctatccctggcttatcggcagttaaacctgaagcaggtctttatttatttccgaaaattgatcgtcagatgtatcgtattgatgatgatgaagaatttgtcttacagttattaaagcaagaaaaagtgatgttggtacatggacgtggttttaactggaaagatccagatcacttccgtattgtttacctaccaagtgtagaagaattagaagatgtccaagaaaagattacacgtgtcttataccagtatagacgttaa

SEQ ID NO: 1226 - protein, 404 aa, Streptococcus pyogenes
MKIIEKSSKLEHVAYDIRGPVLDEANRMIASGEKILRLNTGNPAAFGFEAPDEVIRDLIVNARLSEGYSDSKGIFSARKAIMQYCQLKGFPDVDIEDIYLGNGVSELISISLQALLDNGDEVLVPMPDYPLWTACVSLGGGKAVHYLCDEEAGWYPDIADIKSKITSRTKAIVVINPNNPTGALYPKEILEDIVALAREHQLIIFADEIYDRLVMDGKEHIAIASLAPDVFCVSMNGLSKSHRIAGFRVGWMVLSGPKDHVKGYIEGLNMLANMRLCSNVLAQQVVQTSLGGHQSVDALLLPGGRIFEQRNFIYEAINAIPGLSAVKPEAGLYLFPKIDRQMYRIDDDEEFVLQLLKQEKVMLVHGRGFNWKDPDHFRIVYLPSVEELEDVQEKITRVLYQYRR

SEQ ID NO: 1227 - DNA, 507 bp, Streptococcus pyogenes
atgaaaaaaagaataaaagctattcttgtcaaactgttaaaggaggacagttctatgtcactaaaatataaacgtatcctcgttgctattgatggctcttatgagtctgaattagctttcaataaaggcgttaacgtagcactacgtaacgacgctaccttactactagtacacgttattgatacccgtgccttgcaaagcgtagctacttttgatacttacatctatgaaaaattagaacaagaagctaaggatgttttagatgattttgaaaaacaagcacagatagcaggaattacaaacatcaaacaaattattgaatttggcaaccccaaaaacttactagctcacgatattccagatcgtgagaacgctgatttaattatggtaggagctactggtcttaatacctttgaacgcctccttattggctcatcttctgagtacattatgcgacacgctaagattgacttacttgtagtccgagatagcactaaaacactctag

SEQ ID NO: 1228 - protein, 168 aa, Streptococcus pyogenes
MKKRIKAILVKLLKEDSSMSLKYKRILVAIDGSYESELAFNKGVNVALRNDATLLLVHVIDTRALQSVATFDTYIYEKLEQEAKDVLDDFEKQAQIAGITNIKQIIEFGNPKNLLAHDIPDRENADLIMVGATGLNTFERLLIGSSSEYIMRHAKIDLLVVRDSTKTL

SEQ ID NO: 1229 - DNA, 1395 bp, Streptococcus pyogenes
atgatttcagcagaacaacttgtttttacctatcatgatcaaaaaaatccagcttgtcagatatcgacttgtcaaattgcctctggacaattcattgttttgtgtggaccttctggttcaggtaaatctacctttttaaaacttcttaatggcataattcctgattattatgctggaaaatatgaaggtagactagatgtggctgattgccaagcaggcagagacagtgttgaaacattttctagatctgtggcctctgtttttcaaaatccagccagtcagtttttctatcgcgaagtccaacacgaactagtctttccttgtgaaaatcaaggtttagatgcaaaggttatcatgaagcgtctttggactttagcagaagattttgcttttgcagagctccttaacaaggatatgtttggattgtcaggagggcaaaaacaaagagttgctattgcaacggccattatgcaaggtactaatattatgctttttgatgagccaactgctaacttagatagtgcaggcatagctgctgttaaagcctatcttacccaattaaaagcagcaggaaaaaccattattgtagccgagcatcgcttacattacttgatggatttggcagataactttttctactttaaaaatggtagattaacagataagttaacaacacaaaatttgctagccttgacagatgaacaacggcaagatatgggactacgtcgcttagacttgtctgacctaaaacctgtgttagctggtaagattgagagtcaacattatcgcccagatgatagcctgtgtattgagcatctaacagttagagcgggaagcaaaatacttagatgtattgaacagcttagttttgctgtaggaagtatttctggcattacaggatcaaacgggcttggaaaatcgcaattagtttattatatagctggtatcttagacgataaaaaagcaactattaagtttcaaggcatacctttatctgccaagcaacgtttatcaaagactagtattgtcttgcaagaagtttctttgcaactatttgcagaatcggtttcaaaggaagtcaacttgggccatgaacgacatccacggacgacagaagtaatagagcggttatctttaacgactcttttagaacgtcatccagctagtttgtcaggaggtgagcaacaaagagtgatgattgccgctagtcttttggctgataaagatatcttaatttttgatgagccaagtagcggacttgatttgttacaaatgaaggctttagctaatcttctcatgcagctgaagacccaacataaggttgtcatcctcatttcacatgatgaagaacttctaagtagtgtctgcgataccatttatcaaatgctaccttaa

SEQ ID NO: 1230 - protein, 464 aa, Streptococcus pyogenes
MISAEQLVFTYHDQKNPACQISTCQIASGQFIVLCGPSGSGKSTFLKLLNGIIPDYYAGKYEGRLDVADCQAGRDSVETFSRSVASVFQNPASQFFYREVQHELVFPCENQGLDAKVIMKRLWTLAEDFAFAELLNKDMFGLSGGQKQRVAIATAIMQGTNIMLFDEPTANLDSAGIAAVKAYLTQLKAAGKTIIVAEHRLHYLMDLADNFFYFKNGRLTDKLTTQNLLALTDEQRQDMGLRRLDLSDLKPVLAGKIESQHYRPDDSLCIEHLTVRAGSKILRCIEQLSFAVGSISGITGSNGLGKSQLVYYIAGILDDKKATIKFQGIPLSAKQRLSKTSIVLQEVSLQLFAESVSKEVNLGHERHPRTTEVIERLSLTTLLERHPASLSGGEQQRVMIAASLLADKDILIFDEPSSGLDLLQMKALANLLMQLKTQHKVVILISHDEELLSSVCDTIYQMLP

SEQ ID NO: 1231 - DNA, 3828 bp, Streptococcus pyogenes
atgaaaaaaatcagcaaatgtgcgtttgtggcaatatctgcccttgttctcattcaggctactcaaactgtaaaatcacaagagcctttagttcagtcacaactcgtgacaacagtagctttaactcaggataatcgacttttagttgaagagataggcccttacgctagtcaatcagctggaaaagagtattataaacatattgaaaagattattgttgataatgatgtctatgaaaaaagcctggagggcgagcgaacctttgatattaactaccaagggattaagatcaatgctgaccttattaaagacggtaagcatgaattgactattgttaataaaaaagatggtgatatcctaattacctttattaaaaagggcgataaagtgacctttatttcagctcaaaaattaggaacaacagatcatcaggattcattaaaaaaagatgtgctcagtgataaaacagtgccacaaaaccaaggcacacaaaaagttgttaaatctgggaaaaatactgctaacttgtcattaataacaaaattgagtcaagaagatggtgcaattttatttccagaaattgatcgttattctgataacaaacagataaaagcattgactcagcaaatcacaaaggttacagtcaatggtacagtttataaagatcttatttcagattctgtaaaagatactaatggctgggtctcgaatatgacagggcttcatcttggaacaaaagctttcaaagatggagaaaatacaatcgtgatatcctcaaaaggatttgaagacgttactattaccgttaccaagaaagatggtcaaatccattttgtatctgccaaacaaaaacaacatgtgactgctgaagacagacaatcaacaaagttggatgtcaccactttggaaaaagctatcaaagaagcggatgcgattattgctaaagaaagcaacaaagacgcggtcaaagatctggctgagaaacttcaagtcatcaaggattcttacaaagaaatcaaagatagtaagctactcgccgatactcatcgactgttaaaagataccatcgagtcttatcaagcaggtgaggtttctattaacaatctcacagaaggaacctatacgctaaactttaaagctaataaagaaaactcagaagagtcctccatgcttcaaggtgcttttgataaaagagccaaattagtggttaaagcagatggtacaatggaaatttccatgcttaatactgctttgggacaatttttgattgacttttctattgaaagcaaagggacctacccagcagcagtgcgtaaacaagttggccaaaaagatatcaatggtagctatattcgaagcgaatttaccatgcctattgatgatttggataaattacacaaaggtgctgttttggtatcagccatgggaggtcaagaaagtgatttaaaccactatgacaaatacaccaaacttgacatgacctttagtaagaccgttaccaaaggctggagtggttatcaggtagaaactgatgataaagaaaaaggggttgggactgaacgtcttgaaaaagttttagttaaacttggcaaagatttagacggcgatggtaaattatcaaaaacggaattagaacagattcgaggcgagttgcgtctagaccattacgagttaactgatatttctttattgaaacatgctaaaaatattacagaactacatctggatggaaaccaaattacggaaattccaaaagagttatttagtcaaatgaagcaacttcgatttcttaacttaagaagtaatcatttaacttatctagacaaagatacatttaaaagcaatgctcaattaagagaactctacttatcaagtaactttattcactctcttgaaggaggactattccagtcgcttcatcacctggagcaacttgatctttccaagaatcgtattggccgactttgtgataacccatttgaaggattgtctcgtctgacttcattaggtttcgcagaaaatagtcttgaggagatacctgaaaaagcgctagagcctctaacatcacttaattttatcgacttatctcaaaataatttagcactactgccaaaaacaatagaaaaattgcgcgccttaagcactattgtggcaagtagaaatcatattactcgtattgataatatttcatttaaaaatcttcctaaattatctgtactcgatttatcaactaatgaaatttcaaatcttccaaatggtatatttaaacagaataaccaattaacaaaacttgattttttcaataacttgcttactcaggttgaagaatcagtatttccagatgttgaaacgcttaatttagatgtgaagttcaatcagataaaaagtgtgagtccaaaagtaagagctcttatcggacaacacaaactgactccacaaaaacatattgcaaaacttgaagcttccttagatggcgaaaaaataaaatatcatcaagctttcagtcttttagatttgtattattgggagcaaaaaacaaattctgccattgataaagaactagtgtctgttgaagaatatcaacaattgttacaagaaaaaggttcagatacggtttctttacttaatgatatgcaagtcgattggagtattgtgattcagttgcaaaaaaaagcttccaatggacagtatgtgacggttgacgaaaagcttctctcaaatgatccgaaagatgacttaacgggagagttttctttaaaagatccaggtacatatcggattcgcaaagctttaataacaaagaaatttgctactcaaaaagaacatatctatttgacatctaatgatatccttgtggcgaaaggaccacattcacatcagaaagatttagttgagaacggccttagagcattaaatcaaaaacaattgcgtgatggtatttactatttaaatgccagcatgttaaaaactgacttagcatctgagtccatgtcaaacaaggctattaatcatcgagtgactttggtagttaaaaaaggtgtttcctatttagaagttgagtttagaggtataaaggttggtaaaatgttaggctaccttggtgaattgagctatttcgtagatggttaccaaagagatttagctggtaaaccagttggtcgaacaaaaaaggcagaggttgtgtcttatttcacggatgtaactggcctaccattggcagatcgttatggaaaaaactatccaaaagtgctgcgtatgaaattgattgaacaagcgaagaaagacggacttgtgccattacaggtctttgtgcctatcatggatgccatttcaaaagggtctggccttcaaaccgtttttatgcgtttagactgggcaagccttacaacagagaaggcaaaggttgtcaaagaaactaataatccacaagaaaatagccatctaacttcaacagatcagttgaaaggacctcaaaatcgtcaacaagaaaaaacacctacaagtcctccttcagcagctactggtattgctaacttaactgatctcctggctaaaaaagcaaccggccaatcaactcaagaaacttctaagacagatgatactgataaggcagagaaattgaagcagttagtgcgtgaccatcaaacatcaattgaaggtaaaacagcaaaagatactaagactaaaaaatctgataagaaacatcgttccaatcaacaatcaaatggtgaagaaagtagctctcgttatcacttaattgcaggtctatctagctttatgatcgtagctctgggattcattattggtcgaaagacattatttaaataa

SEQ ID NO: 1232 - protein, 1275 aa, Streptococcus pyogenes
MKKISKCAFVAISALVLIQATQTVKSQEPLVQSQLVTTVALTQDNRLLVEEIGPYASQSAGKEYYKHIEKIIVDNDVYEKSLEGERTFDINYQGIKINADLIKDGKHELTIVNKKDGDILITFIKKGDKVTFISAQKLGTTDHQDSLKKDVLSDKTVPQNQGTQKVVKSGKNTANLSLITKLSQEDGAILFPEIDRYSDNKQIKALTQQITKVTVNGTVYKDLISDSVKDTNGWVSNMTGLHLGTKAFKDGENTIVISSKGFEDVTITVTKKDGQIHFVSAKQKQHVTAEDRQSTKLDVTTLEKAIKEADAIIAKESNKDAVKDLAEKLQVIKDSYKEIKDSKLLADTHRLLKDTIESYQAGEVSINNLTEGTYTLNFKANKENSEESSMLQGAFDKRAKLVVKADGTMEISMLNTALGQFLIDFSIESKGTYPAAVRKQVGQKDINGSYIRSEFTMPIDDLDKLHKGAVLVSAMGGQESDLNHYDKYTKLDMTFSKTVTKGWSGYQVETDDKEKGVGTERLEKVLVKLGKDLDGDGKLSKTELEQIRGELRLDHYELTDISLLKHAKNITELHLDGNQITEIPKELFSQMKQLRFLNLRSNHLTYLDKDTFKSNAQLRELYLSSNFIHSLEGGLFQSLHHLEQLDLSKNRIGRLCDNPFEGLSRLTSLGFAENSLEEIPEKALEPLTSLNFIDLSQNNLALLPKTIEKLRALSTIVASRNHITRIDNISFKNLPKLSVLDLSTNEISNLPNGIFKQNNQLTKLDFFNNLLTQVEESVFPDVETLNLDVKFNQIKSVSPKVRALIGQHKLTPQKHIAKLEASLDGEKIKYHQAFSLLDLYYWEQKTNSAIDKELVSVEEYQQLLQEKGSDTVSLLNDMQVDWSIVIQLQKKASNGQYVTVDEKLLSNDPKDDLTGEFSLKDPGTYRIRKALITKKFATQKEHIYLTSNDILVAKGPHSHQKDLVENGLRALNQKQLRDGIYYLNASMLKTDLASESMSNKAINHRVTLVVKKGVSYLEVEFRGIKVGKMLGYLGELSYFVDGYQRDLAGKPVGRTKKAEVVSYFTDVTGLPLADRYGKNYPKVLRMKLIEQAKKDGLVPLQVFVPIMDAISKGSGLQTVFMRLDWASLTTEKAKVVKETNNPQENSHLTSTDQLKGPQNRQQEKTPTSPPSAATGIANLTDLLAKKATGQSTQETSKTDDTDKAEKLKQLVRDHQTSIEGKTAKDTKTKKSDKKHRSNQQSNGEESSSRYHLIAGLSSFMIVALGFIIGRKTLFK

SEQ ID NO: 1233 - DNA, 84 bp, Streptococcus pyogenes
atgattgatttaaaaaggaatcttttcaaaattgatgtccgggcacaaaaggatgaagagaaagttttcatgcgtacggcgtga

SEQ ID NO: 1234 - protein, 27 aa, Streptococcus pyogenes
MIDLKRNLFKIDVRAQKDEEKVFMRTA

SEQ ID NO: 1235 - DNA, 1440 bp, Streptococcus pyogenes
atggatctaccacaagctattcgctaccgcccttacaaagagtggagctcaaaagactaccaagctattactgaaaaaatggcccaatccccatggcacagccaatttcatgtcgaacctaagacaggattactcaatgaccccaatgggttttcttatttcaacggtcgctaccatcttttttatcaaaactggccttatggcgctgcgcacggtctgaaacaatgggtacacatgacatccacagacctcgtccattttacggaaacaaggagccgccttctgccagaccacgctcacgatagtcatggggcttactcaggttctgcatatgctattgatgacaagctcttcctcttttacactggtaatgttcgcgatgccaattgggtcagaacaccattacaggttggcgcatggatggataaacaaggaaatatttccaaaataccacaggttttgattgaacagcccgatgatgttacagaacattttcgggatcctcagcttttttcttatcaaggtcaattctatgctattattggcgcccaaggtttagatggcaaaggaaaaatcaaactttacaaagctgtggacaatcatgtggacaactggcgatttatagccgatttggactttgacgattctggtacggaatacatgattgaatgccccaaccttgtgtttgtcgatgacaagcctgttttgattttcagcccacaaggactggctaaagctgatttagattatcaaaatatctaccccaatacctataaaatttttgaaagcttcaatccagaaactggccaattgctgggtggaggggcccttcaaaatcttgactttggttttgaagcttatgccactcaagcctttagtagtccagatggcagggttctagccgtgtcttggattgggttaccagatattgattatccgacagatcgttatgactatcaaggagctcttagtttagtgaaagaattaaggattaaagacggaattctctatcaaacacctgtttcagccctacaaaatcttcgagggccagcagaattatttcataataaaatagacagttctaactgttatgaattggaattgacgattccaggccaaaaaaagcttgacctgctcctatttgccgaccaaaaagggaatggcctaagattgaaagtggatacaacaaaaggacagttaagcattgaccgaagtcgggcaggggttcaatatgcccaagactatggtacggtgcgctcttgccaaatcccacaaggccatgttacacttaatgtctatgtggacaattccattcttgaaatctttattaaccaagggcaaaaagtcctaactagtcgggttttcccaacccacggacaaacaggtatccaagtagtagaaggacaagcttttggacattattatgaaatgaggtattag

SEQ ID NO: 1236 - protein, 479 aa, Streptococcus pyogenes
MDLPQAIRYRPYKEWSSKDYQAITEKMAQSPWHSQFHVEPKTGLLNDPNGFSYFNGRYHLFYQNWPYGAAHGLKQWVHMTSTDLVHFTETRSRLLPDHAHDSHGAYSGSAYAIDDKLFLFYTGNVRDANWVRTPLQVGAWMDKQGNISKIPQVLIEQPDDVTEHFRDPQLFSYQGQFYAIIGAQGLDGKGKIKLYKAVDNHVDNWRFIADLDFDDSGTEYMIECPNLVFVDDKPVLIFSPQGLAKADLDYQNIYPNTYKIFESFNPETGQLLGGGALQNLDFGFEAYATQAFSSPDGRVLAVSWIGLPDIDYPTDRYDYQGALSLVKELRIKDGILYQTPVSALQNLRGPAELFHNKIDSSNCYELELTIPGQKKLDLLLFADQKGNGLRLKVDTTKGQLSIDRSRAGVQYAQDYGTVRSCQIPQGHVTLNVYVDNSILEIFINQGQKVLTSRVFPTHGQTGIQVVEGQAFGHYYEMRY

SEQ ID NO: 1237 - DNA, 453 bp, Streptococcus pyogenes
atgactaacagctttcaaaattcaagaagagatttgcgtgaacgtgcctttcaggctttatttaacatagagatgggagctgagttattggcagcttctcagtttgcctatggttatgataaagtaacaggggaggacgctcaagtattggagctgccgatttttttattaagtcttgtgacgggtgtcaataatcataaagaagagttggataacttgatatcaactcatttgaaaaaaggttggtcgttagaacgcttgacactaacagacaaaacgttattacgactaggtctttttgaaatcaagtattttgacaaaacaccagatcgtgttgcactaaacgaaatcattgaagtagttaaaaaatattctgatgaaacctctgctaaatttattaatggcttacttagccaatatgtctcgggagctccttcagcaaataaatcataa

SEQ ID NO: 1238 - protein, 150 aa, Streptococcus pyogenes
MTNSFQNSRRDLRERAFQALFNIEMGAELLAASQFAYGYDKVTGEDAQVLELPIFLLSLVTGVNNHKEELDNLISTHLKKGWSLERLTLTDKTLLRLGLFEIKYFDKTPDRVALNEIIEVVKKYSDETSAKFINGLLSQYVSGAPSANKS

SEQ ID NO: 1239 - DNA, 462 bp, Streptococcus pyogenes
atgacaaatcgtttatcatggcaagactattttatggccaatgcagagctgatttccaagcgctctacctgtgatcgcgcctttgtgggagctgttttggtaaaggataaccgcattattgccacaggttacaatggcggagtttctgctacggataactgcaacgaagcgggtcattatatggaagacggacattgtattcgcactgttcatgctgaaatgaatgctttgattcaatgtgcgaaagaaggaatttcaacggacggaactgaaatttacgtgactcattttccttgtattaactgcactaaggcgcttttgcaggcggggattacaaagattacctataaagcacattaccgtccgcacccctttgccattgaactgatggagaaaaaaggggttgcctatgtgcaacatgatgtgcctcaaattgttttaggaggcgataaggaacaatag

SEQ ID NO: 1240 - protein, 153 aa, Streptococcus pyogenes
MTNRLSWQDYFMANAELISKRSTCDRAFVGAVLVKDNRIIATGYNGGVSATDNCNEAGHYMEDGHCIRTVHAEMNALIQCAKEGISTDGTEIYVTHFPCINCTKALLQAGITKITYKAHYRPHPFAIELMEKKGVAYVQHDVPQIVLGGDKEQ

SEQ ID NO: 1241 - DNA, 1074 bp, Streptococcus pyogenes
atgtcaggatttttagaacaacgattaggtcactgcctaaggcagatggcagagaaggggctagaggctcttctagtcacccatttaaccaatagttattacttgacaggtttttctggaactgcagcaactgttttgataacggccaaacgtcgtgttttgatcacagattcacgttataccttgcttgctaaagctagtgttgagggatttgatattatcgaaagccgcacgccgcttaaggttgtggcagaattgttagaggctgatcaaatagattgccttggttttgaggaccaggtatcgttttctttttaccaggccatgcaagcagaactgtcaggaataaccttgcttgctcagtcaggttttgtggagcatttacgtcttattaaggacgcctctgaaatcgataccattgctaaagcgtgctcgatctcagacaaagcatttgaagatgctcttgattttattaaaccagggacaaccactgaacgtgacctggctaattttttagattttcgtatgcgtcagtatggtgccagcggcacatcatttgatatcattgtagcttcaggctatctctctgccatgcctcatggacgcgccagtgacaaggttatccagaataaagagagcttgaccatggactttgggtgttactacaatcactatgttagtgatatgacgaggaccattcatattggccaagttactgatgaagaacgtgagatttatgctcttgttcttgctgctaataaggctttaattgctaaagctagcgctggcatgacttatagtgactttgacggtattccgcgccaactcatcactgaggcgggttatggcagtcgcttcacacatggcattggtcatggcatcgggcttgacatccatgagaatccattttttgggaaatctgagcaacttctccaagctggaatggtggtaacagatgagccaggtatctatttggataacaaatatggtgtccgtattgaagatgacttggttatcacaaaaactggttgtcaagtcttgaccttggcacccaaagaattaattgtattgtaa

SEQ ID NO: 1242 - protein, 357 aa, Streptococcus pyogenes
MSGFLEQRLGHCLRQMAEKGLEALLVTHLTNSYYLTGFSGTAATVLITAKRRVLITDSRYTLLAKASVEGFDIIESRTPLKVVAELLEADQIDCLGFEDQVSFSFYQAMQAELSGITLLAQSGFVEHLRLIKDASEIDTIAKACSISDKAFEDALDFIKPGTTTERDLANFLDFRMRQYGASGTSFDIIVASGYLSAMPHGRASDKVIQNKESLTMDFGCYYNHYVSDMTRTIHIGQVTDEEREIYALVLAANKALIAKASAGMTYSDFDGIPRQLITEAGYGSRFTHGIGHGIGLDIHENPFFGKSEQLLQAGMVVTDEPGIYLDNKYGVRIEDDLVITKTGCQVLTLAPKELIVL

SEQ ID NO: 1243 - DNA, 2829 bp, Streptococcus pyogenes
atgcaaaataaaataataattcatggggcaagagcccacaatttaaaaaatattgacgtggaaattccacgagacaaattagttgtcgtgacagggttatcagggtcaggaaaatctagtctagcctttgatactatttatgcggaagggcaacgtcgttacgtagaaagtttatcagcttatgctagacagttcttgggtaatatggaaaaaccagatgtggattccattgacggtcttagccctgctatttccattgaccaaaaaaccaccagtaagaaccctcgctcaacggttggtacggttacggaaatcaatgattatttacgtctactatatgcgcgtgtgggcacaccttactgtatcaatgggcatggtgctatcacggcgtcttctgcagaacaaattgtagagcaggtcttagccctccctgaacggacacgcatgcagattttagctcctgttgttcgtcggaagaaggggcaacacaaaacagtttttgagaaaattcaaaaagacggctatgtccgtgtgcgcgttgacggggatatttttgacgtgacagaagtgccagagttgtccaaaagtaagatgcacaacattgaggtggttattgaccgtctggttaataaggatggtattcgtagccgtttatttgattcggttgaagcagctttaaggctgggagatggctaccttatgattgacactatggatggcaatgaactgctcttttctgagcattattcctgtcctgtctgtggatttacggttcctgaattagaaccaagactcttctcttttaatgcgccgttcggctcttgtccgacctgtgatgggctaggcattaagttggaagtggatttggacttggttgttcctgacccaagtaagtctttgagagagggagctttggcgccttggaatcctatttcctccaattattacccaaccatgcttgagcaagctatggcaagttttggggtggatatggatacaccttttgaggccttgactgaggaagaaagagatttagtgctttatggttcaggtgatagagaatttcattttcactatgtgaatgattttggtggtgagcgtaacattgacattccttttgaaggtgttgtaactaatgttaatcgccgttatcacgaaactaatagtgattatacgcgcaatgtgatgcgtggttatatgaacgaattgacctgtgcgacttgtcatggttaccgtttgaatgaccaagctttgtgtgtgcatgtgggtggcgaagaaggaactcatattggtcaaatttcagaattatcgattgccgaccacttgcagttattggaagaattggaactcacagaaaatgaaagtaccattgctaaaccgattgtcaaagaaatccatgaccgtctgacattcttaaataatgtgggactgaattatctgaccttgtcacgggctgctgggactttatcaggtggtgaaagtcaacgaatcaggttagcaacacaaattggttctaacctatcaggggtgctctatatcttggatgagccttctattggattgcatcaaagagacaatgaccgtttgatcgagagcctgaaaaaaatgcgtgatttgggtaatacgttaattgtggtagaacacgatgaagacaccatgatgcaggcagactggctgattgatgtgggaccgggggcaggtgagttcggtggagaaattactgcctctggaacgccgaaacaagtggctaagaataaaaaatccatcacgggtcaatatttgtctggtaaaaaattcattccagtgcctttagagcgccgttctggtaatggccgattcattgaaataaaaggagcagcgcagaataatcttcaaagcctcgacgtgagattcccactgggtaaatttattgcggtcacaggggtatcaggctcagggaaatcaaccttggttaatagtattttgaaaaaggctgtcgcccaaaaattaaaccgtaatgctgataagcctggtaaatatcactctatttctggtattgaacatattgaacgcttgattgacattgaccaaagtccgattggaaggacgccacggtcaaatccagccacctatacgggtgtctttgatgatattcgagacttgtttgcccaaaccaacgaagctaagattcgtggttacaaaaaaggccgtttctcttttaatgtcaaaggtgggcgttgtgaggcttgttcaggtgatgggattatcaaaatcgaaatgcactttttgccagatgtttatgtgccttgtgaggtttgccacggcagacggtataattctgagacgcttgaggtgcattacaaaggaaaaaatatcgcagaagtccttgatatgactgtcgatgatgccttggtatttttctctgctattcctaaaatcgctcgaaaaattcaaacgattaaggatgttggacttggttatgtgaccttaggtcaaccagctaccaccctctctgggggagaagctcaacggatgaagttggctagtgaattgcacaaacgctcgacaggtaagagcttgtatatcctagatgagccaacgactggtttacacacagatgatattgcaaggctattaaaagttttggaacgctttgtagacgatggtaatacggttcttgtgattgagcataatttggacgttatcaaatctgctgaccatattattgacttaggaccagaaggtggtgacggaggtggtcagattgttgccacggggacaccagaagaggtagctcaagttaaagaaagctatactggtcattatttgaaagtaaaactacaacaatag

SEQ ID NO: 1244 - protein, 942 aa, Streptococcus pyogenes
MQNKIIIHGARAHNLKNIDVEIPRDKLVVVTGLSGSGKSSLAFDTIYAEGQRRYVESLSAYARQFLGNMEKPDVDSIDGLSPAISIDQKTTSKNPRSTVGTVTEINDYLRLLYARVGTPYCINGHGAITASSAEQIVEQVLALPERTRMQILAPVVRRKKGQHKTVFEKIQKDGYVRVRVDGDIFDVTEVPELSKSKMHNIEVVIDRLVNKDGIRSRLFDSVEAALRLGDGYLMIDTMDGNELLFSEHYSCPVCGFTVPELEPRLFSFNAPFGSCPTCDGLGIKLEVDLDLVVPDPSKSLREGALAPWNPISSNYYPTMLEQAMASFGVDMDTPFEALTEEERDLVLYGSGDREFHFHYVNDFGGERNIDIPFEGVVTNVNRRYHETNSDYTRNVMRGYMNELTCATCHGYRLNDQALCVHVGGEEGTHIGQISELSIADHLQLLEELELTENESTIAKPIVKEIHDRLTFLNNVGLNYLTLSRAAGTLSGGESQRIRLATQIGSNLSGVLYILDEPSIGLHQRDNDRLIESLKKMRDLGNTLIVVEHDEDTMMQADWLIDVGPGAGEFGGEITASGTPKQVAKNKKSITGQYLSGKKFIPVPLERRSGNGRFIEIKGAAQNNLQSLDVRFPLGKFIAVTGVSGSGKSTLVNSILKKAVAQKLNRNADKPGKYHSISGIEHIERLIDIDQSPIGRTPRSNPATYTGVFDDIRDLFAQTNEAKIRGYKKGRFSFNVKGGRCEACSGDGIIKIEMHFLPDVYVPCEVCHGRRYNSETLEVHYKGKNIAEVLDMTVDDALVFFSAIPKIARKIQTIKDVGLGYVTLGQPATTLSGGEAQRMKLASELHKRSTGKSLYILDEPTTGLHTDDIARLLKVLERFVDDGNTVLVIEHNLDVIKSADHIIDLGPEGGDGGGQIVATGTPEEVAQVKESYTGHYLKVKLQQ

SEQ ID NO: 1245 - DNA, 1125 bp, Streptococcus pyogenes
atgtgggataatgagacaatcgcttcttttcgtcgcacacttttagagtggtatgaccaagaaaaacgtgatctcccttggcgaagaactactaatccatattatatttgggtttctgaaatcatgttgcaacaaacacaagttaatacggtaatcccttattataaacgttttctagagtggtttcctcaaataaaagatttggcagacgctcctgaagaacaattactaaaggcatgggagggactaggctattattctcgggtgcgtaatatgcaaaaggctgcacagcaagtgatggttgattttggtggcatatttcctcacacttatgatgatattgcttcattaaaagggattggtccttatactgcaggtgctatcgccagcatctcattcaacttaccagagcctgctgttgatggcaatgtgatgcgtgtcatggctcgtttgtttgaagttaattatgatatcggtgaccctaaaaatcgtaaaatttttcaagctattatggaaatactaattgaccctgacagacccggtgattttaaccaggcacttatggatctaggtacagacatcgaatccgctaagacacctaggcctgatgaaagccctattcgtttctttaacgctgcttatttgaatggtacttatggtaaataccccataaaaaatccaaagaaaaagcctaaaccaatgcgaattcaggcttttgtcattcgtaaccaaaatggccagtatctactggagaaaaatactaaagggagacttctaggaggattttggtcatttcctattatcgaaacatcacctctttctcaacaattagatttatttgatgacaatcaatccaaccccataatctggcaaacccaaaatgaaactttcgaaagagaatatcaattaaagccacaatggactgataatcactttccaaatattaagcacacttttagtcaccagaagtggacaatagaactcatagagggggtggtcaaagcaacagatttacctaatgctcctcacctaaagtgggtagcaattgaggacttttctctttatccctttgcaacaccacaaaagaaaatgctagagacctacttaaaacagaaaaatgcttaa

SEQ ID NO: 1246 - protein, 374 aa, Streptococcus pyogenes
MWDNETIASFRRTLLEWYDQEKRDLPWRRTTNPYYIWVSEIMLQQTQVNTVIPYYKRFLEWFPQIKDLADAPEEQLLKAWEGLGYYSRVRNMQKAAQQVMVDFGGIFPHTYDDIASLKGIGPYTAGAIASISFNLPEPAVDGNVMRVMARLFEVNYDIGDPKNRKIFQAIMEILIDPDRPGDFNQALMDLGTDIESAKTPRPDESPIRFFNAAYLNGTYGKYPIKNPKKKPKPMRIQAFVIRNQNGQYLLEKNTKGRLLGGFWSFPIIETSPLSQQLDLFDDNQSNPIIWQTQNETFEREYQLKPQWTDNHFPNIKHTFSHQKWTIELIEGVVKATDLPNAPHLKWVAIEDFSLYPFATPQKKMLETYLKQKNA

SEQ ID NO: 1247 - DNA, 588 bp, Streptococcus pyogenes
atggaaattggtcagcaaattattcgctaccgtaaacaacaagcgctctcgcaagaaaaattagccgagaaagtctatgtaagccgtcagagcatatctaactgggaaaatgacaaaacttacccagacatccatagcctcttactcctaagtcaaatttttcaagtgagcttagaccaactcattaaaggagacattgagaaaatgaaatataccatcactcaggttgataaaaagaattttaaacgagataccaaagtaatggtaacattgatgatactattaatgatttcaagttatccattagtctatttcttagagtggctaggacttggcatttttgttttattatcgataattactatgacttatgctaatcgtgtggaacgttttaagaaaaaatatgatgtgcaaccttataaggaaatcctagctgtttcaaatggaaaattattagacgaaatcgaaaaacgagaagaaagagcaacacttccttatcagaaaccccttattgtcactgtatttttcctcattactgttgcttttgcttttgcaagtcgttttatgtttacatggttattccattga

SEQ ID NO: 1248 - protein, 195 aa, Streptococcus pyogenes
MEIGQQIIRYRKQQALSQEKLAEKVYVSRQSISNWENDKTYPDIHSLLLLSQIFQVSLDQLIKGDIEKMKYTITQVDKKNFKRDTKVMVTLMILLMISSYPLVYFLEWLGLGIFVLLSIITMTYANRVERFKKKYDVQPYKEILAVSNGKLLDEIEKREERATLPYQKPLIVTVFFLITVAFAFASRFMFTWLFH

SEQ ID NO: 1249 - DNA, 2340 bp, Streptococcus pyogenes
atgaataacaagattttagagcagttagaatttaacaaagttaaggaattgctattaccttatctcaagacagaacaatcacaagaagaattattagagctggagccgatgacggaggctcctaaaatagaaaaaagttttaatgaaatttctgacatggaacagatttttgttgaacatcactcatttggcatagtcagcctaagttcaatctctgagagtttaaaacgcttagagctttcaactgatcttaatattcaagaacttttggctatcaaaaaagttttacagagttcttcggatatgattcacttttattctgatttggataatgtttctttccaatctttggatcgtttgtttgaaaatttggaacaattccctaatctgcaagggtcttttcaagctatcaatgatggtggttttttagaacattttgcgagtccagaattagagcgtatccgtcgtcaattaacaaatagtgaacgacgggttcgtcagattttacaggatatgcttaaggaaaaagcagagcttttatcagagaatctaatcgctagtcgtagtggacgaagtgtcctaccagtaaaaaatacttatcggaatcgtatttctggtgtggttcatgacatctcttcttcaggaagtactgtttatattgagcctcgtgctgtagttacactaaacgaagagataacgcagcttagagctgacgaacgccacgaagaaggtcgtattttacacgcattttcagacttgttaagacctcatgtcgccactattagaaataatgcatggattcttgggcatcttgattttgtaagggctaaatatctttttatgtctgataataaggcgacgatacctaagatttctaatgacagcacgttagcattaatcaatgttcgtcatcctctgttaagtaatcctgtggctaatgacttacattttgatcacgatttaactgcaattgtcatcactggtcccaatactggtggtaagacgattatgctaaaaacactcggtttagcacaattaatgggacagtctggtttgccagtattagcggataaaggtagtaaaattgcagtatttaacaatatctttgcagatattggcgatgagcaatctattgaacaaagtctatcaactttttctagtcatatgacgcacatagtcagtattttaaacgaggctgaccacaatagtttagttctctttgatgaactaggagcaggaacggatcctcaagaaggtgctagtttggccatggctattttagaacaccttaggttaagtcatatcaaaacgatggcgaccacgcactatccagaattaaaagcttatgggattgagacaaattttgtagagaatgcgagcatggaatttgatgcagaaacgcttagccccacatatcgctttatgcaaggagttcctggacgctcaaatgcatttgaaattgcttctcgccttggtttagctccatttattgttaaacaagctaagcagatgacagattctgactcagatgttaaccgtattattgaacagttagaggcacagacacttgagacacgtagaagactggatcatattaaagaagttgaacaagaaaacctcaaattcaatcgtgcggttaagaaactctataatgaattttcacatgaacgcgataaagagttagaaaaaatctatcaagaagctcaagaaattgtagatatggctttgaatgagagtgatactatcttaaaaaaactcaatgataagagccaattaaaacctcacgaaattatagatgctaaggcacaaataaaaaaattagcacctcaagttgatttatcaaaaaataaagtcttaaataaggctaaaaaaatcaaagcagctcgtgcccctagaattggtgatgatattatagtgactagttatggacagcgaggtaccttaactagtcaattaaaagatggccgttgggaagcacaagtgggaattatcaaaatgacattaacacaagatgaatttagcctcgttagagtccaagaagaacagaaagtcaaaaataaacagattaatgtggttaaaaaggctgatggttctggaccaagagctcgacttgatcttagaggtaaaagatacgaagaagcaatgcaagagttagatcattttattgatcaagcattgcttaacaatatgggacaagttgatatcattcatggtattggtacaggcgttattcgtgagggagtgacaaaatatcttcgtcgtaataagcatgttaagcattttgcttatgccccacaaaatgcagggggatctggtgccacaattgtaacgttagggtaa

SEQ ID NO: 1250 - protein, 779 aa, Streptococcus pyogenes
MNNKILEQLEFNKVKELLLPYLKTEQSQEELLELEPMTEAPKIEKSFNEISDMEQIFVEHHSFGIVSLSSISESLKRLELSTDLNIQELLAIKKVLQSSSDMIHFYSDLDNVSFQSLDRLFENLEQFPNLQGSFQAINDGGFLEHFASPELERIRRQLTNSERRVRQILQDMLKEKAELLSENLIASRSGRSVLPVKNTYRNRISGVVHDISSSGSTVYIEPRAVVTLNEEITQLRADERHEEGRILHAFSDLLRPHVATIRNNAWILGHLDFVRAKYLFMSDNKATIPKISNDSTLALINVRHPLLSNPVANDLHFDHDLTAIVITGPNTGGKTIMLKTLGLAQLMGQSGLPVLADKGSKIAVFNNIFADIGDEQSIEQSLSTFSSHMTHIVSILNEADHNSLVLFDELGAGTDPQEGASLAMAILEHLRLSHIKTMATTHYPELKAYGIETNFVENASMEFDAETLSPTYRFMQGVPGRSNAFEIASRLGLAPFIVKQAKQMTDSDSDVNRIIEQLEAQTLETRRRLDHIKEVEQENLKFNRAVKKLYNEFSHERDKELEKIYQEAQEIVDMALNESDTILKKLNDKSQLKPHEIIDAKAQIKKLAPQVDLSKNKVLNKAKKIKAARAPRIGDDIIVTSYGQRGTLTSQLKDGRWEAQVGIIKMTLTQDEFSLVRVQEEQKVKNKQINVVKKADGSGPRARLDLRGKRYEEAMQELDHFIDQALLNNMGQVDIIHGIGTGVIREGVTKYLRRNKHVKHFAYAPQNAGGSGATIVTLG

SEQ ID NO: 1251 - DNA, 2328 bp, Streptococcus pyogenes
atggcaactgttaaaaccaatacagatgttttcgaaaaagcttgggaaggctttaaaggaactgactggaaagaaaaagcaagtgtctcacgttttgtacaagctaactacaccccatacgatggcgatgaatctttcttggctggtgctactgaacgttcacttcacatcaaaaaagttatcgaagaaacaaaagcacactatgaagctacacgtttcccatacgatactcgtccaacttcaattgctgacattcctgctggtttcatcgataaagaaaatgaattaatttatggtattcaaaacgatgaattgttcaaattgaacttcatgccaaaaggtggtatccgtatggcggaaacgacccttaaagaaaacggctatgaaccagacccagcagtacatgaaatctttactaagtatgtgacaactgttaacgacggtatcttccgcgcttatacttcaaatattcgtcgcgctcgtcatgcccacactgtaactggtcttccagatgcttactcacgtggacgtatcatcggtgtttacgctcgtcttgctctttacggtgctgactacttgatgcaagaaaaagtcaatgactggaatgctatcactgaaatcgatgaagaatccattcgtcttcgcgaagaagttaaccttcaataccaagctcttggtgaagtggttaaacttggtgacctttacggagttgatgttcgtcgcccagcacaaaacgttaaagaagctatccaatgggtaaacatcgctttcatggctgtatgtcgtgtgatcaacggtgctgctacttctcttggacgtgtgccaatcgttcttgatatctttgcagaacgtgaccttgctcgcggtacctttacagaatcagaaatccaagaatttgttgatgattttgtccttaaactccgtaccgtaaaatttggtcgtacgaaagcttacgatgcgctttactcaggtgacccaacattcatcacaacttctatggctggtatgggtaacgatggtcgtcaccgtgtaactaagatggactaccgtttcttgaacacgcttgataatattggtaactctccagaaccaaacttgactgttctttggactgaccaactgccagaaacattccgtcgctactgtatgaaaatgagccacaagcactcttctatccaatatgaaggtgtgacaacaatggctaaagaaggttatggtgaaatgtcatgtatttcatgttgtgtgtcaccacttgacccagaaaatgaagaacaacgtcataacatccaatacttcggtgctcgtgtaaacgttcttaaagcccttcttactggtcttaacggtggttacgatgatgttcacagagactacaaagtgtttaacgttgttgaaccaatcacatcagaagttcttgagtacgacgaagttatggctaactttgagaaatctcttgactggttgacagatacttatgtagatgcgcttaacatcatccactacatgactgataaatacaactacgaagcagttcaaatggccttcttgccaacacaccaacgtgctaacatgggattcggtatctgtggtttcgctaacacagttgataccttgtcagctattaaatacgcaactgttaaaactatccgcgatgaaaatggctacatctatgactacgaagtaacaggtgacttccctcgttacggtgaagatgacgaccgtgttgatgacatcgcgaaatggttgatggaagcttaccacacacgtcttgcaagccacaaactttacaagaatgctgaggcttcagtatcacttcttaccatcacttcaaacgttgcttactctaaacaaactggtaactctccagttcaccgcggcgtcttcttaaacgaagatggtacagttaacactagccaagtggaattcttctcaccaggtgctaacccatctaacaaagcaaaaggtggctggttacaaaaccttaactcacttgctaaactggaattctcacatgctaacgatggtatctcattgactactcaagtatcacctcgtgctcttggtaaaacatttgacgaacaagttgacaacttggtaacagtgcttgacggttactttgaaaatggtggtcagcacgttaacttgaacgttatggaccttaacgatgtttatgacaaaatcatgaacggcgaagacgttatcgtacgtatctctggttactgtgtcaacaccaaataccttacaccagaacaaaaaactgaattgacacaacgtgtcttccacgaagtgctttccatggacgatgctgctgaagctatttcaagtaaatag

SEQ ID NO: 1252 - protein, 775 aa, Streptococcus pyogenes
MATVKTNTDVFEKAWEGFKGTDWKEKASVSRFVQANYTPYDGDESFLAGATERSLHIKKVIEETKAHYEATRFPYDTRPTSIADIPAGFIDKENELIYGIQNDELFKLNFMPKGGIRMAETTLKENGYEPDPAVHEIFTKYVTTVNDGIFRAYTSNIRRARHAHTVTGLPDAYSRGRIIGVYARLALYGADYLMQEKVNDWNAITEIDEESIRLREEVNLQYQALGEVVKLGDLYGVDVRRPAQNVKEAIQWVNIAFMAVCRVINGAATSLGRVPIVLDIFAERDLARGTFTESEIQEFVDDFVLKLRTVKFGRTKAYDALYSGDPTFITTSMAGMGNDGRHRVTKMDYRFLNTLDNIGNSPEPNLTVLWTDQLPETFRRYCMKMSHKHSSIQYEGVTTMAKEGYGEMSCISCCVSPLDPENEEQRHNIQYFGARVNVLKALLTGLNGGYDDVHRDYKVFNVVEPITSEVLEYDEVMANFEKSLDWLTDTYVDALNIIHYMTDKYNYEAVQMAFLPTHQRANMGFGICGFANTVDTLSAIKYATVKTIRDENGYIYDYEVTGDFPRYGEDDDRVDDIAKWLMEAYHTRLASHKLYKNAEASVSLLTITSNVAYSKQTGNSPVHRGVFLNEDGTVNTSQVEFFSPGANPSNKAKGGWLQNLNSLAKLEFSHANDGISLTTQVSPRALGKTFDEQVDNLVTVLDGYFENGGQHVNLNVMDLNDVYDKIMNGEDVIVRISGYCVNTKYLTPEQKTELTQRVFHEVLSMDDAAEAISSK

SEQ ID NO: 1253 - DNA, 888 bp, Streptococcus pyogenes
atgcttatccttagactgatacaagctttgctagtttcggcaatgctttttattttctttatgttagtaaaacatcttaaaaaaaataagatcaatccttttaaacgcttttggacggggttttggattggcctgctaacagatgcccttgacacccttgggatagggtcttttgctactaccacaacgtgctttaagttaactaaattagtcactgacgatagacaattgcctggcactatgaccgtagctcatgtgcttccggtgctcattcaatctctttgctttatttttgtcgtaaaagttgaggttctaactttacttgctatggctgcagcagcctttattggagcttattttgggactcatattacaaaaaactggcatgctccaactgtccaacgaatccttggtagtcttttaatcatagcagctataatcatgatcattagaataatctaccatccaggagaacacctttcagacaccattcatggcctccatggcatctggctttttgttggaattggttttaattttatcgttggagtcttgatgactatggggttaggcaattatgctccagaattgattttcttttcattaatgggtcttagcccaacagttgctatgcctgttatgatgctagatgcagctatgattatgacagcttctagtagccagtttatcaaagcaaaccgtgtcagttgggatggttttgctggaattgtttctggtggtattattggcgttttactagctgtgtttttcttaacgaatttagatattaatagcttgaaacttctggtcatcgctatcgttttcttcactggtggaatgctgattcgttcctcctttacctctcataagcaacaaacaaatagataa

SEQ ID NO: 1254 - protein, 295 aa, Streptococcus pyogenes
MLILRLIQALLVSAMLFIFFMLVKHLKKNKINPFKRFWTGFWIGLLTDALDTLGIGSFATTTTCFKLTKLVTDDRQLPGTMTVAHVLPVLIQSLCFIFVVKVEVLTLLAMAAAAFIGAYFGTHITKNWHAPTVQRILGSLLIIAAIIMIIRIIYHPGEHLSDTIHGLHGIWLFVGIGFNFIVGVLMTMGLGNYAPELIFFSLMGLSPTVAMPVMMLDAAMIMTASSSQFIKANRVSWDGFAGIVSGGIIGVLLAVFFLTNLDINSLKLLVIAIVFFTGGMLIRSSFTSHKQQTNR

SEQ ID NO: 1255 - DNA, 1296 bp, Streptococcus pyogenes
atgccctttgatagtaacacttatattataccattgaaatatattatattctgctttttttgtaaaatgtttatgaaaatagagaggagttcattttcaatggaagaaaaattgtttaacaaacattttgtggccatcacagtaataaactttatagtctatatggtctactatctttttacagttattattgcctttgtggcgactagagagctaggagctcagactagccaggcaggattggcaacagggatttatattctagggactttattagcccgtttgatttttggaaagcagttggaggtgtttggtcgtcgtttggttttaagaggaggtgctattttttacctcttaacgaccttagcctacttttatatgccaacgattagcatgatgtacttggttcgtttcttgaacggatttggttatggtgtagtatcaactgcgacaaataccattgtaacagcctatattccagctcgtaaaagaggagaaggaattaatttttatggcttgtcaaccagtctagcagcagctattggcccttttgtaggaacctttatgttggataatcttcatattgattttcgcatgattattgtcttatgtagcgtcttgattgggtgtgtggttgttggtgcttttgcttttccagtcaaaaacatgtctttaaatgcggagcaattggctaaaaccaaatcgtggactgtggatagtttcattgagaaaaaagccttgtttatcactgcaatcgcctttttaatggggattgcctatgcttcagttttaggatttcaaaaattatacacgtctgaaattcatttgacaacagtaggcgcttatttctttgtggtctatgccttaatcattaccatcactcgtccagcaatgggacgtttaatggatgctaaaggcgataaatgggtcttgtacccaagttatctttttttagcaatgggactcttcttgctaggtagtgtatcgtctggaggaagctatttgctttcaggagccttgattggctttggttatggcacttttatgtcttgtggtcaagccgcctccatacaaggagtggatgagcaccgctttaatacggctatgtctacttatatgattggtcttgatttaggtttaggtgctgggccttacctcttgggcttgattaaagatttggcacttggtagtggtgtggcttcctttaggcacttattctggttagctgctgtgattccactgatttgtaccttgctttacttgttaaaaacaaagacaagacaggttgtgtcttaa

SEQ ID NO: 1256 - protein, 431 aa, Streptococcus pyogenes
MPFDSNTYIIPLKYIIFCFFCKMFMKIERSSFSMEEKLFNKHFVAITVINFIVYMVYYLFTVIIAFVATRELGAQTSQAGLATGIYILGTLLARLIFGKQLEVFGRRLVLRGGAIFYLLTTLAYFYMPTISMMYLVRFLNGFGYGVVSTATNTIVTAYIPARKRGEGINFYGLSTSLAAAIGPFVGTFMLDNLHIDFRMIIVLCSVLIGCVVVGAFAFPVKNMSLNAEQLAKTKSWTVDSFIEKKALFITAIAFLMGIAYASVLGFQKLYTSEIHLTTVGAYFFVVYALIITITRPAMGRLMDAKGDKWVLYPSYLFLAMGLFLLGSVSSGGSYLLSGALIGFGYGTFMSCGQAASIQGVDEHRFNTAMSTYMIGLDLGLGAGPYLLGLIKDLALGSGVASFRHLFWLAAVIPLICTLLYLLKTKTRQVVS

SEQ ID NO: 1257 - DNA, 738 bp, Streptococcus pyogenes
atgtctcaattctattcgactggagaattggccaacttagctggcgtttctattcgaactgtccaatactatgaccaacgtgggattttgattccgacagcattgacagcaggtggacggcgactctatacggattctgatttagaacaattacgcatgatttgctttctgcgcgatttgggattttccattgagcagattcgcaaagtcttagcagaggaaaatgcagcccaggtgctggaattgcttctagttgatcatattgcgactgccaaggaagacttggctgcaaaagagcaacaagttgacatagctgtcaagatacttgacagacttcgaaaacaagacccccagtcactagattttctgatggacatttcgcttagcatgaaaaatcaaaaagcttggaaaaaattacaatggaagatgggtatcagtatatttttagccattgtttcatatgtaggacttattttactatctagttatctgcaaaaattttggttagtttatgttgctatgggactatttctaccaggtttcagttggttggtaatttattttaggaagcaatttatttatctctgtccccattgtcatcagaaatttgaacctagctttaatgaatttgcccttgcaggccatacaccacgaaccagaaagttaacctgctcccattgccatcaaaaatcgtattgcttggaactggcaaaagaggacactgtctcaagaagataa

SEQ ID NO: 1258 - protein, 245 aa, Streptococcus pyogenes
MSQFYSTGELANLAGVSIRTVQYYDQRGILIPTALTAGGRRLYTDSDLEQLRMICFLRDLGFSIEQIRKVLAEENAAQVLELLLVDHIATAKEDLAAKEQQVDIAVKILDRLRKQDPQSLDFLMDISLSMKNQKAWKKLQWKMGISIFLAIVSYVGLILLSSYLQKFWLVYVAMGLFLPGFSWLVIYFRKQFIYLCPHCHQKFEPSFNEFALAGHTPRTRKLTCSHCHQKSYCLELAKEDTVSRR

SEQ ID NO: 1259 - DNA, 1203 bp, Streptococcus pyogenes
atgcaatttatttatagtattattggtattttattggtattaggaattgtgtatgcaatttctttcaatcgtaagagtgtttctctaagtttaattggaaaagctcttatcgttcaattcattattgcgctaatcttagtacgtatcccactaggccaacaaattgttagtgttgtttcaactggagttactagcgtaatcaactgtggtcaagctggtttaaattttgtgtttgggtcattagcagatagtggcgcaaaaactggttttattttcgctattcaaacgcttggtaatattgttttcttatctgccctagttagtctactttattatgtaggaatccttggatttgtagtaaaatggataggtaagggcgttggtaaaattatgaaatcctcagaggttgagagttttgttgctgtagctaatatgtttcttggtcaaacagacagtccaatcttggttagcaaatacctaggtcgtatgactgatagtgagataatggttgtgttggtatcaggtatgggaagtatgtcagtttctattcttggtggctatattgcattaggcattccaatggaatatctcttgattgcttcaacaatggttcctattggcagtattctcattgctaaaatcttattgcctcaaacagaacctgttcaaaaaattgatgacattaagatggataataaaggtaataacgccaatgtgattgatgcaatcgctgagggtgcaagcacaggtgcacaaatggctttctcaattggtgctagtttgattgcctttgttggtttagtttctttgattaatatgatgttaagtggattgggaatccgcttagaacaaatcttttcatatgtttttgctccatttggttttcttatgggatttgaccacaaaaacattcttctagaaggaaaccttcttggaagtaagttgattttaaatgagtttgtttcgttccaacaattgggtcacctaatcaaatctttagattatcgtacagcattggtagcaactatttcactctgtggttttgctaatttatcaagtttaggtatttgtgtttcaggtattgctgttctttgcccggagaaacgtagcaccctagctcgacttgttttccgtgcaatgattggtggtattgctgtaagtatgcttagcgcctttatcgtcggtattgtaactctattctaa

SEQ ID NO: 1260 - protein, 400 aa, Streptococcus pyogenes
MQFIYSIIGILLVLGIVYAISFNRKSVSLSLIGKALIVQFIIALILVRIPLGQQIVSVVSTGVTSVINCGQAGLNFVFGSLADSGAKTGFIFAIQTLGNIVFLSALVSLLYYVGILGFVVKWIGKGVGKIMKSSEVESFVAVANMFLGQTDSPILVSKYLGRMTDSEIMVVLVSGMGSMSVSILGGYIALGIPMEYLLIASTMVPIGSILIAKILLPQTEPVQKIDDIKMDNKGNNANVIDAIAEGASTGAQMAFSIGASLIAFVGLVSLINMMLSGLGIRLEQIFSYVFAPFGFLMGFDHKNILLEGNLLGSKLILNEFVSFQQLGHLIKSLDYRTALVATISLCGFANLSSLGICVSGIAVLCPEKRSTLARLVFRAMIGGIAVSMLSAFIVGIVTLF

SEQ ID NO: 1261 - DNA, 426 bp, Streptococcus pyogenes
atgaaaacagttgaagaacaagcaaaaaatatttatcagcttttggaaatggtttatggcacgtctccttggactttagaacaagtattaatcgatatacggcgggatcaaacagattatttcctactatatgatcatgataaattgctaggttttttagctattcaagatttagctggtgaagttgaaatgactcaaattgctatactacctagtcatcaagaacttgggctagcgtctcaattgatgacgcatttagatagcattgaaagtgacatctttttagaggttagagaatctaatcatagagcacagggtttatatcagaagtttggttttaaatttattggcaaaagaccagactactatagaaatcctatagaaacagctttattgatgaaacgggaaggaaaacatgacagatag

SEQ ID NO: 1262 - protein, 141 aa, Streptococcus pyogenes
MKTVEEQAKNIYQLLEMVYGTSPWTLEQVLIDIRRDQTDYFLLYDHDKLLGFLAIQDLAGEVEMTQIAILPSHQELGLASQLMTHLDSIESDIFLEVRESNHRAQGLYQKFGFKFIGKRPDYYRNPIETALLMKREGKHDR

SEQ ID NO: 1263 - DNA, 1284 bp, Streptococcus pyogenes
atgtctacatcatttgaaaacaaagctacaaatcgtggcgtgattacatttacaatcagtcaagataaaataaaaccagctcttgataaagcttttaataaaatcaaaaaagacttgaatgcaccaggtttccgtaaaggacacatgcctcgtccagtcttcaaccaaaaatttggtgaagaagttctttatgaagatgctttgaatattgtattgccagaagcttatgaagcagctgtgacggaacttggtcttgatgtggttgcacaaccaaaaatcgatgttgtgtcaatggaaaaagggaaagagtggacactttctgctgaagttgtgacaaaacctgaagtgaaacttggtgattacaaaaacctagttgtagaagttgatgcttcaaaagaagtttcagatgaagacgtggatgctaaaattgagcgcgaacgtcaaaaccttgcggaactcattattaaagacggtgaagcagctcaaggtgacactgttgtgattgactttgttggttcagttgatggtgttgagtttgatggcggtaaaggagataacttctctcttgaacttggttcaggacaatttatcccaggttttgaagatcaactagttggtgctaaagctggcgatgaagtagaagttaatgtcacattcccagaatcttaccaagcagaagatcttgcaggtaaagccgctaaatttatgacaactattcacgaagtcaaaacaaaagaagtaccagagcttgatgatgagcttgcaaaagatattgatgaagatgttgacacacttgaagacttaaaagtaaaatatcgtaaagaacttgaagcagctcaagaaactgcttatgatgatgctgttgaaggagctgcgattgaattagcagttgcaaatgctgaaattgttgatttacccgaagaaatgattcatgaagaagtcaaccgttcagtgaatgaatttatgggcaacatgcaacgtcaaggaatctcacctgaaatgtacttccaattgactggtacaactcaagaagatttacataaccaatattcagctgaagctgacaaacgtgttaaaacacaccttgttattgaagcaattgctaaagcagaaggttttgaagcaacagatagtgaaattgaacaagaaattaatgaccttgcaacagaatataacatgccagctgaccaagttcgttctcttctttcagcagatatgttgaaacatgatattgcaatgaaaaaagcagttgaagtgattacaagcacagcaagcgttaagtaa

SEQ ID NO: 1264 - protein, 427 aa, Streptococcus pyogenes
MSTSFENKATNRGVITFTISQDKIKPALDKAFNKIKKDLNAPGFRKGHMPRPVFNQKFGEEVLYEDALNIVLPEAYEAAVTELGLDVVAQPKIDVVSMEKGKEWTLSAEVVTKPEVKLGDYKNLVVEVDASKEVSDEDVDAKIERERQNLAELIIKDGEAAQGDTVVIDFVGSVDGVEFDGGKGDNFSLELGSGQFIPGFEDQLVGAKAGDEVEVNVTFPESYQAEDLAGKAAKFMTTIHEVKTKEVPELDDELAKDIDEDVDTLEDLKVKYRKELEAAQETAYDDAVEGAAIELAVANAEIVDLPEEMIHEEVNRSVNEFMGNMQRQGISPEMYFQLTGTTQEDLHNQYSAEADKRVKTHLVIEAIAKAEGFEATDSEIEQEINDLATEYNMPADQVRSLLSADMLKHDIAMKKAVEVITSTASVK

SEQ ID NO: 1265 - DNA, 1074 bp, Streptococcus pyogenes
atgaaaattttggtagccatagattcttttaagggatcggtaacgtctccagaacttaacactagtgtagctcaagcccttctttctgtcgataagcagttagttattgaaacaagagctatcgctgatggaggagaaggaagtttagtagccctctcacaaaccgtggcggggaggtggcatcaagtaaaaaccattgatctattaagacgcccgattaaagtcgcttattatcgtcacgcaaagcaagcttttattgaatctgcgagtattattggtattgataagatcacctccaattcagtaacctatgcacaagccacttcctacggtttgggtttggcagttaaagatgccattcaaaaaggagctactcaaatcgaaatcatgctaggaggcacaggcacttctgatggtggcaaagggtttttggaaagtttaaactatgatttcatgacaggaagatcttatcttgatactttagcatcacctgttacgctattagggctgactgatgtgaccaatccatatcatggccctcaaggatttgctgcggtctttggccctcaaaaaggtgggagtcttagtcaaattgaagaaactgatcaaattgcaagtaactttgctaaaaaagttttttgccaaacaaccattgatttacagacaataccaggaagtggagcagctggaggattaggaggtgccattgtcctattaggaggcaccttaactagtggttttagcaggattgcagagctactaaatctggataattcccttcagtcttgtgatttagttattactggagaaggatgcctggatacacaatcacaatctggcaaggtacctgttgcgattgcaagaatggctaaaaaatatcaagttccaacgattgctctatgtggttctgtaaagattgagacaggactagcagcagaagactttttggctgttttttcaatacaacagcagccaatttccttagaagcagcgatagataaaacaacaacactttctaatatcaaaatattagcagctaaccttatgctattgatagctcagtttaataagtaa

SEQ ID NO: 1266 - protein, 357 aa, Streptococcus pyogenes
MKILVAIDSFKGSVTSPELNTSVAQALLSVDKQLVIETRAIADGGEGSLVALSQTVAGRWHQVKTIDLLRRPIKVAYYRHAKQAFIESASIIGIDKITSNSVTYAQATSYGLGLAVKDAIQKGATQIEIMLGGTGTSDGGKGFLESLNYDFMTGRSYLDTLASPVTLLGLTDVTNPYHGPQGFAAVFGPQKGGSLSQIEETDQIASNFAKKVFCQTTIDLQTIPGSGAAGGLGGAIVLLGGTLTSGFSRIAELLNLDNSLQSCDLVITGEGCLDTQSQSGKVPVAIARMAKKYQVPTIALCGSVKIETGLAAEDFLAVFSIQQQPISLEAAIDKTTTLSNIKILAANLMLLIAQFNK

SEQ ID NO: 1267 - DNA, 1407 bp, Streptococcus pyogenes
atgactaaaacattacctaaagattttatttttggtggtgctacagctgcttaccaggctgaaggcgctacccacacagatggtaaaggaccagtagcttgggataaatacttagaagacaactattggtacacagctgagccagcaagtgatttttataatcgttaccctgtcgatttgaaacttagtgaagaatttggtgtcaacggcatccgtatctctattgcctggtctcgtatttttccaacaggaaaaggagaagttaaccctaaaggagtagaatactaccacaatctttttgcagagtgtcataagcgtcatgttgagccttttgttacacttcaccattttgataccccagaagctctccactcggatggtgacttcctcaatcgtgagaacattgaacattttgtaaattatgcagaattttgttttaaagaattctcagaagttaactattggacaacatttaacgaaattgggcctattggtgatggccaatacttagttggtaaattccctccaggtatccaatatgatcttgctaaagttttccaatcacaccataacatgatggtctctcatgctcgtgcagtcaaactctttaaagatagtggttattcaggtgaaattggtgttgtccatgcacttccaactaagtatccatttgacgctaacaatcctgatgatgttagagcagctgaacttgaagatatcatccataataaatttatccttgatgctacttatcttggtaagtattcagataaaacaatggaaggtgttaaccatatccttgaggtgaatggcggtgaacttgatcttcgcgaagaagattttgccgcactagacgccgcaaaagatttgaatgatttccttggtattaactactatatgagtgattggatgcaagcttttgatggtgagactgaaatcattcacaatggcaagggtgaaaaaggcagctctaaataccaaatcaagggtgttggtcgaagaaaagcacccgttgatgttccaaaaacggactgggactggattatcttcccacaaggcttatatgatcaaatcatgcgtgtcaaagccgattatcctaattacaagaaaatttacattacagagaatggtcttggctacaaagatgagtttgtagataatactgtctatgatggtggacgtatcgattatgtgaaaaaacacttagaagttatttctgatgctatttctgatggtgcaaatgttaaaggatactttatgtggtcactgatggatgtcttttcatggtcaaatggctatgaaaaacgttacggtctcttctatgttgattttgaaactcaagaacgttatcctaagaagagtgcctactggtataaaaaagtagcagaaactcaagtgattgaatga

SEQ ID NO: 1268 - protein, 468 aa, Streptococcus pyogenes
MTKTLPKDFIFGGATAAYQAEGATHTDGKGPVAWDKYLEDNYWYTAEPASDFYNRYPVDLKLSEEFGVNGIRISIAWSRIFPTGKGEVNPKGVEYYHNLFAECHKRHVEPFVTLHHFDTPEALHSDGDFLNRENIEHFVNYAEFCFKEFSEVNYWTTFNEIGPIGDGQYLVGKFPPGIQYDLAKVFQSHHNMMVSHARAVKLFKDSGYSGEIGVVHALPTKYPFDANNPDDVRAAELEDIIHNKFILDATYLGKYSDKTMEGVNHILEVNGGELDLREEDFAALDAAKDLNDFLGINYYMSDWMQAFDGETEIIHNGKGEKGSSKYQIKGVGRRKAPVDVPKTDWDWIIFPQGLYDQIMRVKADYPNYKKIYITENGLGYKDEFVDNTVYDGGRIDYVKKHLEVISDAISDGANVKGYFMWSLMDVFSWSNGYEKRYGLFYVDFETQERYPKKSAYWYKKVAETQVIE

SEQ ID NO: 1269 - DNA, 447 bp, Streptococcus pyogenes
atgaacaaaacaactttcatggctaaaccaggccaagttgaacgcaaatggtacgttgttgacgcagctgatgtgccacttggacgtctttctgcagtagttgctagcgtacttcgcggaaaaaacaaaccaactttcacaccacatactgatacaggtgattttgttatcgttatcaacgctgaaaaagttaaattaactggtaaaaaagcaactgataaagtttactacactcactcaatgtacccaggtggtttgaaatcaatcactgctggtgaacttcgctctaaaaacgcagttcgcttgattgaaaaatcagttaaaggcatgcttccacataacactcttggacgtgcacaaggtatgaaattgaaagtcttcgttggcggtgagcatactcacgcagcacaacaaccagaagtacttgacatctcaggacttatctaa

SEQ ID NO: 1270 - protein, 148 aa, Streptococcus pyogenes
MNKTTFMAKPGQVERKWYVVDAADVPLGRLSAVVASVLRGKNKPTFTPHTDTGDFVIVINAEKVKLTGKKATDKVYYTHSMYPGGLKSITAGELRSKNAVRLIEKSVKGMLPHNTLGRAQGMKLKVFVGGEHTHAAQQPEVLDISGLI

SEQ ID NO: 1271 - DNA, 747 bp, Streptococcus pyogenes
atggaagataaagatactattgaaacaaacgatatcgtctatggtgttcatgccgttacagaaagccttcaagcaaatacaggaaataagctttatatccaagaggatttaagaggaaagaaagtggataacatcaaaagcttagcgacacaaaaaaaggtcgctatttcatggacgcctaaaaaaaccttgtcacaaatgactgatggagctgtgcatcaaggttttgttctgagagtatcagcttttgcctatactgatgttgatgagatcctcgaaatagcagagcaagaagcaaatcctttgattcttattttagatggtctgacagatcctcataatttaggatcgattttacggacagctgatgctacaaatgtatgtggagtgattattcctaaacatcgttctgttggtgtgactccagtggtttcaaagacgtctacaggtgctgttgaacatattccgatagcgagagtaactaaccttagtcaaactctagataaattgaaagcaagaggattctggatttttggcacagacatgaatggaacaccgtctgattgctggaacactaatggtaaacttgctttagtcattggtaacgaaggtaaaggcatctctaccaatatcaaaaagcaagttgatgaaatgattacgattcctatgaatggtcacgtacagagcttaaatgctagcgtagcggcagctattctcatgtatgaagttttccgaaataggcgctaa

SEQ ID NO: 1272 - protein, 248 aa, Streptococcus pyogenes
MEDKDTIETNDIVYGVHAVTESLQANTGNKLYIQEDLRGKKVDNIKSLATQKKVAISWTPKKTLSQMTDGAVHQGFVLRVSAFAYTDVDEILEIAEQEANPLILILDGLTDPHNLGSILRTADATNVCGVIIPKHRSVGVTPVVSKTSTGAVEHIPIARVTNLSQTLDKLKARGFWIFGTDMNGTPSDCWNTNGKLALVIGNEGKGISTNIKKQVDEMITIPMNGHVQSLNASVAAAILMYEVFRNRR

SEQ ID NO: 1273 - DNA, 285 bp, Streptococcus pyogenes
atgattaaaattgtaacggtttgtggaaacggtattggtagtagcttgttacttcgcatgaaagtagaagctatcgcctctagtttgggtattgatgtggatgcagaatcctgtgattccaatgcggctgttggaaagggtgcagatttgtttgttaccgttaaagaatttaaagatatttttccagaggatgccaaggtttgtatcgttaaaagctataccaatcgtaaaaaaattgaagaagatttggttccggttctcaaggaaatgagtggcaaggaataa

SEQ ID NO: 1274 - protein, 94 aa, Streptococcus pyogenes
MIKIVTVCGNGIGSSLLLRMKVEAIASSLGIDVDAESCDSNAAVGKGADLFVTVKEFKDIFPEDAKVCIVKSYTNRKKIEEDLVPVLKEMSGKE

SEQ ID NO: 1275 - DNA, 2061 bp, Streptococcus pyogenes
atgctatctcatgagctcatcagaaactatcaactcttttctaaatataaaggacattcactggaggcatttgaatccattttaaaggcaagcaaacgtcatatactggcagatattgctaaaatcaatgacacgttgtcactctatcagttaccccttattgctctggacaggcagctggtttatccgccagaccttactgaaaaggacttgttgaatcgcatgctacctaccttagacgactatctctttcaagatgagcgtctggatatgattatcatttacatcatgatggctaaagaatttatctccattaaccacttggaaagcttgttacggctcagcagaaattctgttattgctgatttaaacttggtgcgtgatcgggtacaagcttttcaggtaactttagcttacaatcgccaggatggttatttttttgaaggagaacccttagccttgcggcgtctcttagaatcagcggtcagttctcttttgcaagtcacatctggaccttgggtgttcagttacttattgcatgaacttggtttgcccgaccagaaaaaggtgatggcagcaacgttggaggaactgagcagggagaaccacttaacttttatttcggagaaattgagggatttgatttattttttctgccttctcgctcatcgaccattttcacggaacgtaagggctgaagcagtggatacttttcctttagcttcgccagctgttgaaacgatggtggaccagttattggtcaacttccccagtctaaccgaagaaaaatatttggttcaatctaggttacttggttgtatccaaggtgacttagagttagtctttcagcaacctatttatgacattatggaggaaatcatcaattcggtggcggttaacacgggattgtctatcaccgataccccagaacttcgtcagaacctatacagtcaccttttgccagcttattaccgactttactacgacattaacttgaccaatcctttgaaggaacaaatcaaacaagattatgaatctctcttttacttggtcaagcgcagcctttctcctctagaaaaacaattggggaaatcagttaatgaagatgaggttgcttattttaccattcattttgggagatggttgcaggcccctaagaagaggccaagcaatcagctggtagccttatctgtttgccctaatggcattagttcgtctctgatgttggaggcaaccttgaaggaactttttccacagctacagtttattaggattcaccagctggacaaaataaagttgttggatccagcatcctttgatttgattttttcaacagtagcttttgactgtgctaaacctgtttatgtgacgcaagctttgatgggacctgttgaaaaaatgatgttgaaaaagatggtctgtgatgactttcatcttcccttgtcagagcaattcgctttggatgatctgttgagtattattcataaacataccacgattactaataaagaaggacttgttagtgatttatcccgttacctgattggtaaccatttaacgattgaaaaaggaggtctaggactattggacttgttaacagcagattttattaggcaggctgatgctgtttcggattggcaggaagcgattcgtttggctgctcagcctttactagaacaccagatgattgaaacatcttatatcgatggcatgattgattcggtcaatgagcttggggcctatattgttttagcccctaaggtggctgttcctcatgcggcgcctgaaaaaggaacgcggcagttaggcatgtctctcttacaactaaaagaacctgtcagctttgatttgaagcaagaaggtgatccagacaagcaagtgcaattgatttttgttttgtctgctgtggattctagttcacatttgaaggctttgcaggaactgtcgttgattttagatgatgatgaacatattgagcaattaattgaggctaagaatactgaggaaataatgagtctgattagccatatgattgaaaaaggagacgaatcacatgattaa

SEQ ID NO: 1276 - protein, 686 aa, Streptococcus pyogenes
MLSHELIRNYQLFSKYKGHSLEAFESILKASKRHILADIAKINDTLSLYQLPLIALDRQLVYPPDLTEKDLLNRMLPTLDDYLFQDERLDMIIIYIMMAKEFISINHLESLLRLSRNSVIADLNLVRDRVQAFQVTLAYNRQDGYFFEGEPLALRRLLESAVSSLLQVTSGPWVFSYLLHELGLPDQKKVMAATLEELSRENHLTFISEKLRDLIYFFCLLAHRPFSRNVRAEAVDTFPLASPAVETMVDQLLVNFPSLTEEKYLVQSRLLGCIQGDLELVFQQPIYDIMEEIINSVAVNTGLSITDTPELRQNLYSHLLPAYYRLYYDINLTNPLKEQIKQDYESLFYLVKRSLSPLEKQLGKSVNEDEVAYFTIHFGRWLQAPKKRPSNQLVALSVCPNGISSSLMLEATLKELFPQLQFIRIHQLDKIKLLDPASFDLIFSTVAFDCAKPVYVTQALMGPVEKMMLKKMVCDDFHLPLSEQFALDDLLSIIHKHTTITNKEGLVSDLSRYLIGNHLTIEKGGLGLLDLLTADFIRQADAVSDWQEAIRLAAQPLLEHQMIETSYIDGMIDSVNELGAYIVLAPKVAVPHAAPEKGTRQLGMSLLQLKEPVSFDLKQEGDPDKQVQLIFVLSAVDSSSHLKALQELSLILDDDEHIEQLIEAKNTEEIMSLISHMIEKGDESHD

SEQ ID NO: 1277 - DNA, 429 bp, Streptococcus pyogenes
atgagtcatttagataagaacaccgctttgaaagccatggtggtgtttcgtaaagctcagcgaacgctagatgcttttggggctgatatttttaaaaaggcagatttaacagccacgcagttcagtgtgcttgaagtactatatactaaaggctgtatgcgaatcaatcacttgattgattctttgttagcgacttcggggaatatgactgttgtactaaataatatggaacgcaatggctggattagcaagtgcaaagacaaaacggataaaagagcctatgtggttaccttaacagataagggtactcgcttgattgaagctgttttgcctaaacacgtcgcacgggtggaagaagcctttgctgttttgactgaaaaagaacaactttgtctgattgaacttctcaaaaagttcaaacaattataa

SEQ ID NO: 1278 - protein, 142 aa, Streptococcus pyogenes
MSHLDKNTALKAMVVFRKAQRTLDAFGADIFKKADLTATQFSVLEVLYTKGCMRINHLIDSLLATSGNMTVVLNNMERNGWISKCKDKTDKRAYVVTLTDKGTRLIEAVLPKHVARVEEAFAVLTEKEQLCLIELLKKFKQL

SEQ ID NO: 1279 - DNA, 849 bp, Streptococcus pyogenes
atggagctaaaagactattttccagagatgcaagtaggccctcatccgttaggagataaagattggatgagtatcaaagaaggggaccaatatgtgcattttcccaaatcatgtttatccgaaaaagagcgcttattacttgaggtggggctgggtcagtgtgaggtcttgcagccgctagggtcaccttggcagcggtatttgcttgatcatcagggcaatccccctcagctgtatgagacttctcagttcatttaccttaatcatcagcaggctttaccagatgacttagttgagttgctccaacaaatgattgcagggcttgaagtcattttgcctatcagtgcaacccaaacggcatttttatgccgacaagcaatctcaataaaggtcttgcgctggcttgaagatctcctgccaacgctagaaagtgattttggtttggccttaaccatgtttgttggaaatgcctggtatcaggtagctgcgggtacattgagagagtgttttgaggaggaatgtcagctgttaacggcctatttaaggcaacaatcaggcagaaaattattaacattttcaggactgatgctgtggtctttgctgtcgcaccacacttttttggcattgacgcgtcagtttcaccaattcctaagtcctcaaagtgatatggccgatgtggttcacgcgctatggtcagaacacggcaatctggtgcagacagcgcagcgcttgtatattcaccgtaactccttgcaatacaaacttgataaatttgctcagcaatcaggactccacttgaagcaattggatgatttagcctttgctcatctctttttgttgaaatattag

SEQ ID NO: 1280 - protein, 282 aa, Streptococcus pyogenes
MELKDYFPEMQVGPHPLGDKDWMSIKEGDQYVHFPKSCLSEKERLLLEVGLGQCEVLQPLGSPWQRYLLDHQGNPPQLYETSQFIYLNHQQALPDDLVELLQQMIAGLEVILPISATQTAFLCRQAISIKVLRWLEDLLPTLESDFGLALTMFVGNAWYQVAAGTLRECFEEECQLLTAYLRQQSGRKLLTFSGLMLWSLLSHHTFLALTRQFHQFLSPQSDMADVVHALWSEHGNLVQTAQRLYIHRNSLQYKLDKFAQQSGLHLKQLDDLAFAHLFLLKY

SEQ ID NO: 1281 - DNA, 432 bp, Streptococcus pyogenes
atggataagcattttcagtatgactatgctatggattgggacaagaaaaatcatgcggttgaagtgacttttgtgttagaagctcaaaataaagaggctataaaaaccattgacgatagtggcgaagtgacccaagatgatattgtctttgaggactatgtgctcttttataaccctgccaagtctcaatttgatgcagcagattatttggttactattccttttgacgctaaaaagggcttttctcgtgaattcttagcttactttgcgcaatttctcaacgatgttgctattgaagggcacagcgatttgatggatttcttagcagatgacagcaaggctgatttcttcttggagtggaacgcgcaagcttttgaagaaggtcaacaaggactagaagaagcagcaagttacccttacccaaggtactaa

SEQ ID NO: 1282 - protein, 143 aa, Streptococcus pyogenes
MDKHFQYDYAMDWDKKNHAVEVTFVLEAQNKEAIKTIDDSGEVTQDDIVFEDYVLFYNPAKSQFDAADYLVTIPFDAKKGFSREFLAYFAQFLNDVAIEGHSDLMDFLADDSKADFFLEWNAQAFEEGQQGLEEAASYPYPRY

SEQ ID NO: 1283 - DNA, 1758 bp, Streptococcus pyogenes
atgcatagaaaaactattattgatttcaaagagctcgggcaacgctatctttttgatgagccattagtagaattggtagccaagtccttagatcaggtcggtccagtcattgaaaaagtacaacactaccaacagctgggctattacgtggtgggctatctcagttatgaagcagctgctttttttgacaatgccctacaaacccataatgacagactaggcaacgagtaccttgcctattttacagtgcacaaaacctgtcaaaaaaaagacctacctcttgattatgacagcattactatccctaaccaatgggtcagcgcaactcaaaaagaagcctatcaaaaagccattgaaaccattcaccgtgagatgcaacagggcaatacttatcaggttaactacacccttcaattaactcaggaactcaatgcagctgatagtttagccatttacaataaactcgtcgttgaacaggctgctggctacaatgcctacatcgcccatgatgagtttgccgttatttcagctagtcctgaattgttctttaaacaagagggcaacaggttaactactaggcctatgaaaggcaccaccaaacgaggggttaatagctggctggatcaacaagaacatgactggctccaagctgacgggaaaaaccgttctgaaaacatgatgattgtggatttgctccgcaatgacatggggaaaatttgccaaacaggcagtgttcgtgttgataggctctgtgaggtcgagcgatactctaccgtctggcaaatgacctcaactattgttggtgacctcaaagcggactgtgacctgatagacattctcaaagctctctttccttgtggctctatcacaggggcaccaaaagtctccaccatggcaattatcacatctctggagccaaaaccaagggggatttattgtggaagtattggcatttgcctacctgatggtcgccgtttcttcaatgttcccattagaaccatccagctcagtcataatcaagctacttatggtgtcggaggcggcatcacttggcaaagcaagtgggaagacgaatacgaggaagtccatcaaaaaacagcttttctctatcggcacaaacaaatctttgacctcaaaacaaccgccaaggtggaacacaaaaaaatagccttccttgagcaacacctcaatcgccttaaagaagcagccacttattttgcttacccttataatgaaaaagctttgcagaaacaactgtcaacctatttggaaaataagaataatgctgcctaccgtttgatgattcgtttatccaaagatggaaagattagcctctctgatcaacccttggaacctttgtcagccgattttctgacagctcaactctctttacagaaaaaggacgtgacagcttcgccttttacctactttaagaccagctaccggcctcatattgagcaaaaatcttatgaacagctattctataaccaagcggggcaattattggaaacgtccattggcaatctctttgttcagctgggtcagaccctctacacaccaccagtggctgtggggattttaccaggactttttcgccaagaactgctagctactggtcaagctcaggaaaaagaggtgacactagctgatttaaaagaggctagcgctatttttggaggaaatgctgtccgtggcctttatcctctcaaccttgagcttactcaccttgatgccctcttagctaagagtcaagcctaa

SEQ ID NO: 1284 - protein, 585 aa, Streptococcus pyogenes
MHRKTIIDFKELGQRYLFDEPLVELVAKSLDQVGPVIEKVQHYQQLGYYVVGYLSYEAAAFFDNALQTHNDRLGNEYLAYFTVHKTCQKKDLPLDYDSITIPNQWVSATQKEAYQKAIETIHREMQQGNTYQVNYTLQLTQELNAADSLAIYNKLVVEQAAGYNAYIAHDEFAVISASPELFFKQEGNRLTTRPMKGTTKRGVNSWLDQQEHDWLQADGKNRSENMMIVDLLRNDMGKICQTGSVRVDRLCEVERYSTVWQMTSTIVGDLKADCDLIDILKALFPCGSITGAPKVSTMAIITSLEPKPRGIYCGSIGICLPDGRRFFNVPIRTIQLSHNQATYGVGGGITWQSKWEDEYEEVHQKTAFLYRHKQIFDLKTTAKVEHKKIAFLEQHLNRLKEAATYFAYPYNEKALQKQLSTYLENKNNAAYRLMIRLSKDGKISLSDQPLEPLSADFLTAQLSLQKKDVTASPFTYFKTSYRPHIEQKSYEQLFYNQAGQLLETSIGNLFVQLGQTLYTPPVAVGILPGLFRQELLATGQAQEKEVTLADLKEASAIFGGNAVRGLYPLNLELTHLDALLAKSQA

SEQ ID NO: 1285 - DNA, 441 bp, Streptococcus pyogenes
atgaaaataattgagtacaaaggaaattacagagatgacctcatttttatggtcttggaagcaaaaaatgccttaaggagaattcccagcattaacccggatcttttgacaattgaaacaagttatttggaaaaagaggattgtttttggctagcggtcaatgaagaaagtcgtgttattggctcaatcgcttattcttctattcccaaaacaaatgaggtcttcttgcaccgtctcttcatcaaaccaagcttaaaacatcaaggcattggcagtcaacttctggcgtttgcagaagattatctaaggaaaatcggcaagagtcatgttcgtatccacttaggtcaacctaaagaacaatggtttgaatcttatcggttttatcctaaacatggttatcaattctatgatgacacgcatctcatcaagaaactaatctaa

SEQ ID NO: 1286 - protein, 146 aa, Streptococcus pyogenes
MKIIEYKGNYRDDLIFMVLEAKNALRRIPSINPDLLTIETSYLEKEDCFWLAVNEESRVIGSIAYSSIPKTNEVFLHRLFIKPSLKHQGIGSQLLAFAEDYLRKIGKSHVRIHLGQPKEQWFESYRFYPKHGYQFYDDTHLIKKLI

SEQ ID NO: 1287 - DNA, 702 bp, Streptococcus pyogenes
atgaaaaaaacaaaacttattttttcttttacttcaatattcattgcaataatttctcgtcctgtgtttggattagaagtagataataattcccttctaaggaatatctatagtacgattgtatatgaatattcagatacagtaattgattttaaaaccagtcataacttagtgactaagaaacttgatgttagagatgctagagatttttttattaactccgaaatggatgaatatgcagccaatgattttaaagatggagataaaatagctatgttctccgtcccatttgattggaactacttgtcagaaggaaaagtcatagcatatacctatggtggaatgacgccttatcaagaagaaccaatgtctaaaaatatccctgttaatttatggattaatagaaagcagattcctgtcccctataatcaaatatcaactaacaaaacaacagttacagctcaagaaattgatctaaaggttagaaaatttttaatatcacaacatcaattatattcttctggttctagctacaaaagtggtaaattagtttttcatacaaatgataattcagataaatattctctcgatcttttctatgtaggatatagagataaagaaagtatttttaaagtatacaaagacaataaatctttcaatatagataaaattgggcatttagatatagaaattgactcctaa

SEQ ID NO: 1288 - protein, 233 aa, Streptococcus pyogenes
MKKTKLIFSFTSIFIAIISRPVFGLEVDNNSLLRNIYSTIVYEYSDTVIDFKTSHNLVTKKLDVRDARDFFINSEMDEYAANDFKDGDKIAMFSVPFDWNYLSEGKVIAYTYGGMTPYQEEPMSKNIPVNLWINRKQIPVPYNQISTNKTTVTAQEIDLKVRKFLISQHQLYSSGSSYKSGKLVFHTNDNSDKYSLDLFYVGYRDKESIFKVYKDNKSFNIDKIGHLDIEIDS

SEQ ID NO: 1289 - DNA, 930 bp, Streptococcus pyogenes
atgaaacaaatgaataaactcattacaggagtggtaacgctggcgacagtcgtgaccttatcagcttgtcaatcatcacacaacaacaccaaactcgtctcgatgaaaggagacaccatcactgtcagtgacttctacaatgagaccaaaaacacagaactcgcacaaaaagccatgttaagcttggtgattagccgcgtttttgagacacaatatgccaacaaagtctctgacaaagaggttgaaaaagcctataaacaaaccgcagaccaatacggtacatcctttaagacagtcctagcacaatcaggcttaacgccagaaacctataaaaaacaaattcgcctcacaaaattagtcgaatatgccgtcaaagaacaagccaaaaacgaaaccatctcaaaaaaagactaccgtcaggcctatgacgcttataccccaaccatgaccgcagaaatcatgcagtttgaaaaagaagaggatgccaaagcagcgcttgaagccgtcaaagctgaaggggcagactttgcagctattgccaaagaaaaaaccactgcagccgataaaaaaacaacctatacgtttgactcaggcgaaacaaccctaccagcagaagtagttagagctgcatcaggcctcaaagaagggaacagatcagaaatcatcacagcgcttgatccagccacctcaaaacgcacctaccatatcatcaaagtcaccaaaaaagcaactaaaaaagcagactggaaagcgtaccaaaaacgcttgaaagacatcatcgtgactggcaaattaaaagaccctgacttccaaaacaaagtcatcgctaaagctcttgataaagcaaatgtcaaaatcaaagacaaagcatttgccaatatcttagcccagtttgcaaaacctaaccaaaaacaacctgcccaaaaatag

SEQ ID NO: 1290 - protein, 309 aa, Streptococcus pyogenes
MKQMNKLITGVVTLATVVTLSACQSSHNNTKLVSMKGDTITVSDFYNETKNTELAQKAMLSLVISRVFETQYANKVSDKEVEKAYKQTADQYGTSFKTVLAQSGLTPETYKKQIRLTKLVEYAVKEQAKNETISKKDYRQAYDAYTPTMTAEIMQFEKEEDAKAALEAVKAEGADFAAIAKEKTTAADKKTTYTFDSGETTLPAEVVRAASGLKEGNRSEIITALDPATSKRTYHIIKVTKKATKKADWKAYQKRLKDIIVTGKLKDPDFQNKVIAKALDKANVKIKDKAFANILAQFAKPNQKQPAQK

SEQ ID NO: 1291 - DNA, 309 bp, Streptococcus pyogenes
atgattaaaattggattgttttgtgcagcaggattttcaaccggtatgttggtgaacaacatgaaagtagctgctgaaaaaaaaggcattgattgtcagattgaagcctatgctcaagggaaattagcggactatgcaccattacttgatgtggcacttttaggcccacaggttgcctatactctggataaatcagaagctatttgtaaagacaatgatatccctattgcagttatcccaatggctgattatggaatgttagacggcaacaaggtgcttgatttagcccttagccttgttaaagaatag

SEQ ID NO: 1292 - protein, 102 aa, Streptococcus pyogenes
MIKIGLFCAAGFSTGMLVNNMKVAAEKKGIDCQIEAYAQGKLADYAPLLDVALLGPQVAYTLDKSEAICKDNDIPIAVIPMADYGMLDGNKVLDLALSLVKE

SEQ ID NO: 1293 - DNA, 747 bp, Streptococcus pyogenes
atgaatcgattagaacgtattattcaactggtttcccagaagaaaaaaatagatgttaacagtttatcagagcaattagacgtttcgaaagtaaccattcgaaaagaccttgataagcttgaaagtaagggcttgttgcgacgggaacatggctatgcggtgctaaacagtggcgatgacctcaatgtacgcttgtcctacaattacaacataaagcgacggattgcagaaaaagcagctgaattggtacaagacaacgataccattatgattgaatctggctcaacctgtgcccttttggcagaagtgctttgccagaccaaacgaaatattaaagtcattaccaattcgtgcttcattgccaactacattcgtcaatatagtagctgtcaaatcattttactgggcggttattaccagcccaattcagaggtgactgttggtcctttattgaaagaaatgatatccctttttcatgtcaatcgtgtctttgttggaacagacggtttcaacaaagatcttggctttatgggcaaggacatgatgcgctcagaaggggtgcgttacatggcagatgctgctgaggaagtggtgattctgaccgattccagcaagttttcaaaaaccagtctggtacaccagttgtcattagctgatgtcaatcgcgtcattacagaccaagcactagacaagcaaacacaagagttattaagtgctagtggtcttgttcttgattttgtttcttag

SEQ ID NO: 1294 - protein, 248 aa, Streptococcus pyogenes
MNRLERIIQLVSQKKKIDVNSLSEQLDVSKVTIRKDLDKLESKGLLRREHGYAVLNSGDDLNVRLSYNYNIKRRIAEKAAELVQDNDTIMIESGSTCALLAEVLCQTKRNIKVITNSCFIANYIRQYSSCQIILLGGYYQPNSEVTVGPLLKEMISLFHVNRVFVGTDGFNKDLGFMGKDMMRSEGVRYMADAAEEVVILTDSSKFSKTSLVHQLSLADVNRVITDQALDKQTQELLSASGLVLDFVS

SEQ ID NO: 1295 - DNA, 1497 bp, Streptococcus pyogenes
atgataaacaaaaaaatatcacttggagttttaagtattctgacagccttttcgcttcaaagtgttagttatgcttgtactggttttattattggcaaagatttaaccaaagacggttctcttctttatggtcgaacagaagatcttgagccacaccataataaaaatttcattgtacgtctagcaaaggacaatcctgctggcgaaaaatggaaagacctctctaatggttttgagtaccccttgcctgagcattcttatcgctatagtgcgattcctgatgtaacacctaacaaaggcgtttatgacgaagctggttttaatgagtttggcgtctctatgtctgcaacagtatcagcttcagctaatgatgccatccaaaaaattgatccttacgtcaaaaatggcttagcggaatcatctatgaccagtgtcattttaccaagtgtcaaaacagcccgtgaaggtgtcgcattgatcgctaaaatagtcactgaaaaaggagctgctgaaggaaatattgttaccttggctgacaaagacggcatctggtacatggaaattctctctggtcaccaatacgttgccatcaaattcccagatgataaatacgctgtttttccaaataccttctatctcggacatgtcgatttcaatgataaggaaaatacgattgcctcagaagatgtggaaaaagtcgctaaaaaagccaaatcttataccgaagttgatggtaaatttcatattgccaaatcttacaatccaccactaaacgatgccaaccgctctcgctctttctcagggattaaatcacttgaccctgattcaaaagtaacttataaagacagcaattatgagttgctccaaagcactgataagaccttcagtctagaagatgcgatgaaactgcaacgtaatcgttttgaggggctggatcttaaaccacttgatcagatggcattagacggtaagggtaaaccaaaatccaaaaaagctgttaaaggttatgcttatcccatatcaaatcctaatgtcatggaagctcatattttccaactgaaaaaagacatccctgctgaattgggtggtgtcatgtggctatctattggcagtcctcgtaatgccccttacttgccataccttggcaatatcagtagaacctatgaagcctatcaagaaaaaagcacccaatataacgataagtcatggtattggacggtgtcacacattaatgatctcgtggctgctcatccaaaaccatttggaactaaagtgattgatgagatgaaaggcttggaaaaaacctggatagccgaacaagacaaaagcaccaaagaaatcagtgacttagtcgtcagtgaccccaaagctgctcaagaaaaagctgataagatttcactagatcgcgctgaaaaaaccttcaaacgcttaaaagctattgaagccaagttggttaaagaaaaacccaaaaacaagaaaggcttgaatagatcataa

SEQ ID NO: 1296 - protein, 498 aa, Streptococcus pyogenes
MINKKISLGVLSILTAFSLQSVSYACTGFIIGKDLTKDGSLLYGRTEDLEPHHNKNFIVRLAKDNPAGEKWKDLSNGFEYPLPEHSYRYSAIPDVTPNKGVYDEAGFNEFGVSMSATVSASANDAIQKIDPYVKNGLAESSMTSVILPSVKTAREGVALIAKIVTEKGAAEGNIVTLADKDGIWYMEILSGHQYVAIKFPDDKYAVFPNTFYLGHVDFNDKENTIASEDVEKVAKKAKSYTEVDGKFHIAKSYNPPLNDANRSRSFSGIKSLDPDSKVTYKDSNYELLQSTDKTFSLEDAMKLQRNRFEGLDLKPLDQMALDGKGKPKSKKAVKGYAYPISNPNVMEAHIFQLKKDIPAELGGVMWLSIGSPRNAPYLPYLGNISRTYEAYQEKSTQYNDKSWYWTVSHINDLVAAHPKPFGTKVIDEMKGLEKTWIAEQDKSTKEISDLVVSDPKAAQEKADKISLDRAEKTFKRLKAIEAKLVKEKPKNKKGLNRS

SEQ ID NO: 1297 - DNA, 1632 bp, Streptococcus pyogenes
atggcaaaagatattaaattttcagcagatgcgcgtgctgccatggtgcgcggagttgatatgttagcagataccgtcaaagtaacgcttggtcctaaagggcgcaatgttgttcttgaaaaagcttttggttctcccttaattactaatgacggggtaaccattgctaaagagatcgaattagaagatcattttgaaaacatgggagcaaaattggtgtctgaagtggcttctaaaaccaatgatattgctggtgatgggacgactactgcaacagttttgacacaagccattgttcatgaaggactaaaaaatgtgacagcaggtgctaatccaattggtatccgtcgaggcattgaaacagcaacagcaacagctgttgaagccttgaaagccattgctcaacctgtatctggcaaggaagctattgctcaggtcgctgcagtatcatcacgctctgaaaaagttggagagtatatctcagaagctatggagcgtgtgggcaacgatggtgtgattaccatcgaagaatctcgaggtatggaaacagaacttgaagtggttgaaggcatgcaatttgaccgtggttacctgtctcaatacatggtcacagacaatgaaaaaatggttgcagaccttgaaaacccatttatcttaatcacggataaaaaagtgtcaaacatccaagacattttgccactacttgaggaagttcttaaaaccaaccgtccattactcattattgcagatgatgtggatggtgaagcacttccaacccttgtcttgaacaagattcgtggtactttcaatgtggttgctgtcaaagcgccaggatttggtgatcgtcgtaaagctatgcttgaagacattgctatcttgacaggtggtacagtgattacagaggatctaggacttgaattaaaagatgctacaatgacagcccttggacaggctgctaagattacagttgataaagatagcacagtaattgttgaaggttcaggaagttcagaagctattgctaaccgtattgcactgattaaatcgcaattagaaacaacaacttctgactttgaccgtgaaaaactacaagaacgtttggcgaaattagctggtggtgtagctgttatcaaagtaggagctccaacagagacagctttaaaagaaatgaaacttcgcattgaggatgctctaaatgctacacgtgcagccgttgaagaaggtatcgttgctggtggtggaacagcacttattacggttattgaaaaagtagcagctcttgagcttgagggcgatgatgctactggacgtaacattgtgcttcgtgctctagaagagcctgtacgtcaaattgctttaaatgctgggtacgaaggctccgtagttattgacaagttgaaaaacagccctgcaggaacaggatttaatgctgcaacaggtgagtgggttgatatgattaaaacaggaatcattgaccctgtcaaagtaacacgatcagcgcttcaaaatgcagcttctgtagctagtcttattttgacaacagaagcagttgttgctaataaacctgaaccagctacgccagcgccagcaatgccagcaggtatggatccaggaatgatgggcggcttctaa

SEQ ID NO: 1298 - protein, 543 aa, Streptococcus pyogenes
MAKDIKFSADARAAMVRGVDMLADTVKVTLGPKGRNVVLEKAFGSPLITNDGVTIAKEIELEDHFENMGAKLVSEVASKTNDIAGDGTTTATVLTQAIVHEGLKNVTAGANPIGIRRGIETATATAVEALKAIAQPVSGKEAIAQVAAVSSRSEKVGEYISEAMERVGNDGVITIEESRGMETELEVVEGMQFDRGYLSQYMVTDNEKMVADLENPFILITDKKVSNIQDILPLLEEVLKTNRPLLIIADDVDGEALPTLVLNKIRGTFNVVAVKAPGFGDRRKAMLEDIAILTGGTVITEDLGLELKDATMTALGQAAKITVDKDSTVIVEGSGSSEAIANRIALIKSQLETTTSDFDREKLQERLAKLAGGVAVIKVGAPTETALKEMKLRIEDALNATRAAVEEGIVAGGGTALITVIEKVAALELEGDDATGRNIVLRALEEPVRQIALNAGYEGSVVIDKLKNSPAGTGFNAATGEWVDMIKTGIIDPVKVTRSALQNAASVASLILTTEAVVANKPEPATPAPAMPAGMDPGMMGGF

SEQ ID NO: 1299 - DNA, 291 bp, Streptococcus pyogenes
atgttaaaaccattaggtgaccgtgtggtcgtaagatttgatgatgaaaaagagcagacagtcggtggttttgtccttgcaggcactcataaagagtcaacacgaaaagcgacagtcctcgctgtcagtgaaacgggtgttcgcactattacaggtgatagcgtgctaccttcagtttcagtgggtcaagaggttttagttgaaaatgggcatgatttagaagtaaccgtagatgatgagaaagtttctatcatccgtgaatctgacatcattgctattgttacaaaataa

SEQ ID NO: 1300 - protein, 96 aa, Streptococcus pyogenes
MLKPLGDRVVVRFDDEKEQTVGGFVLAGTHKESTRKATVLAVSETGVRTITGDSVLPSVSVGQEVLVENGHDLEVTVDDEKVSIIRESDIIAIVTK

SEQ ID NO: 1301 - DNA, 204 bp, Streptococcus pyogenes
atggcacaaggtacagtaaaatggtttaatgctgaaaaaggttttggttttatttcaactgaaaacggtcaagatgtctttgcacatttttcagccatccaaactaatggttttaaaacgttagaagaaggacaaaaagtggcatttgacgtcgaagaaggtcaacgtggacctcaagcagtcaatatcactaaattggcctaa

SEQ ID NO: 1302 - protein, 67 aa, Streptococcus pyogenes
MAQGTVKWFNAEKGFGFISTENGQDVFAHFSAIQTNGFKTLEEGQKVAFDVEEGQRGPQAVNITKLA

SEQ ID NO: 1303 - DNA, 597 bp, Streptococcus pyogenes
atgacaaaggtaaccatcaaagcgccctctgattacctccaaactgactggtctggcggtgaaaccaaccaattgttcctttatcccgaagatggagattacaaaaagagagaattctcttatcgtctctcaactgcaactgtagccctacgacagacaacctttacccgacttgatggctatcacaggattctaatgagcctagacaagcccatcacattaagtgatttgagtcatgctaaagagatttccctagctccttttcaaccctatgcgtttgaaggcgataccagaatcgtcagtcgtggaacctgccaagacatcaatttaatgtatgatgaccaataccaagggcaattattacccgtctggtctgacacaccatttgaggcacctaaagcggactgtcaactactttatgccctaagcaaactgacttattctgtgaccaatcaggcgaatcaagagcttgaagccaatcacttgttggtaaccgagcaggaggccagcctttcagatctaaaagtttgcctcaatcaaacaagccccgcccaaactccagtagctgtttgggcaggcttatggtataagacttag

SEQ ID NO: 1304 - protein, 198 aa, Streptococcus pyogenes
MTKVTIKAPSDYLQTDWSGGETNQLFLYPEDGDYKKREFSYRLSTATVALRQTTFTRLDGYHRILMSLDKPITLSDLSHAKEISLAPFQPYAFEGDTRIVSRGTCQDINLMYDDQYQGQLLPVWSDTPFEAPKADCQLLYALSKLTYSVTNQANQELEANHLLVTEQEASLSDLKVCLNQTSPAQTPVAVWAGLWYKT

SEQ ID NO: 1305 - DNA, 1542 bp, Streptococcus pyogenes
atgacaagagtgattaatttagatggcgaaagccttactatcgaagacgtgattgcgattgctcgccaaggcgtagcctgtcacattgatgatagtgctattgaagctgtgaatgcctctcgtaaaattgttgatgacattgtcagtgaaaaacgggtggtttacggggtgaccaccggttttggatccctttgtaacgtgagcatctcaccagaagatacagttcaactccaagaaaatttgattcgtacccatgctagtggatttggtgacccattgccagaagatgccgtgagagctatcatgctgatccgtatcaattcactagtcaaagggtattctggtattcgtctatccaccattgaaaaactgttggaactgctcaataaaggggttcatccttacattcctgaaaaagggtctctaggggcttcaggagatttggcgccgcttgctcacatggtgcttcctatgcttggtctagggaaagcttactacaaaggagagcttctttctggtcaagaagctcttgataaagctggtattgacaagatttctttagccgctaaagaaggactcgcccttatcaacggaacaactgttctcactgcagtcggtgcccttgcaacctatgacgccattcaattattgaaactgtcagacctagctggtgccctatcccttgaagtgcataacgggattactagtccatttgaagaaaaccttcacaccattcgcccacaaagcggccagttggcaacagcccgcaatatccgaaacctccttgaaggcagccaaaacacaaccgtagctactcaatctcgtgtgcaagacccttacaccttgcgctgcatgcctcaaattcatggggctagcaaagacagtatcgcctatgtcaaatccaaagttgacattgaaatcaattctgtcacagataatccaattatctgtaaagatggccacgttatttcaggaggtaacttccacggagaaccaatggcacagccatttgacttcttaggcatcgccatttctgaaattggaaatgtttctgaacgccgcgtggaacgtttggtcaatagccagctcagcaaattgccatccttccttgtcaaatacccaggtctcaattcaggctttatgattacccagtacgcctgtgcctctcttgcttctgaaaacaaggttttggcacatccagccagtgtggattctatcccatcttgtgagaaccaagaagactttgtcagcatgggcaccaccgctgctcgcaaggcctttgaaatccttaaaaattctcgccgcatcgtggctactgaaatcatggcagcctgccaagcccttgatctcaaacctgaaaatcatgaactaggtaaagggactaaggttgcctacgatctcttccgcaaggaagtcaactttatcgaacacgataaacacatcgaaatctacgatgaactaaacaaggcatcagcagtcattgaagacccaagcttcctcgaagcggttgagcaggcagttgagttgagtatccaattttag

SEQ ID NO: 1306 - protein, 513 aa, Streptococcus pyogenes
MTRVINLDGESLTIEDVIAIARQGVACHIDDSAIEAVNASRKIVDDIVSEKRVVYGVTTGFGSLCNVSISPEDTVQLQENLIRTHASGFGDPLPEDAVRAIMLIRINSLVKGYSGIRLSTIEKLLELLNKGVHPYIPEKGSLGASGDLAPLAHMVLPMLGLGKAYYKGELLSGQEALDKAGIDKISLAAKEGLALINGTTVLTAVGALATYDAIQLLKLSDLAGALSLEVHNGITSPFEENLHTIRPQSGQLATARNIRNLLEGSQNTTVATQSRVQDPYTLRCMPQIHGASKDSIAYVKSKVDIEINSVTDNPIICKDGHVISGGNFHGEPMAQPFDFLGIAISEIGNVSERRVERLVNSQLSKLPSFLVKYPGLNSGFMITQYACASLASENKVLAHPASVDSIPSCENQEDFVSMGTTAARKAFEILKNSRRIVATEIMAACQALDLKPENHELGKGTKVAYDLFRKEVNFIEHDKHIEIYDELNKASAVIEDPSFLEAVEQAVELSIQF

SEQ ID NO: 1307 - DNA, 987 bp, Streptococcus pyogenes
atgctagaagattactacccatccaccactagctattatcatggtgggatcgacgatgacttatatactgccaaatggggcatggtcatgactttccttgaccttaacgacagctcactaaccccatttgaagggacacattttgccttgattggctttaaaagtgataagggggtttatatcaataatggtcgtgtcggagcggtcgaaagtccagctgccatacgaacccagctcgccaaattcccttggcatttaggaaaccaagttatggtttacgatgtgggtaacattgacggccccaatcgctctttggaacaactgcaaaacagtttaagcaaagccatcaaacggatgtgtgacctcaatctcaaacccatcgtcttaggaggtggccatgaaaccgcctacggccactacttaggcctacgccaaagcctatccccaagtgatgacctagctgtcatcaatatggacgcccactttgatttaaggccttacgaccaaacaggccctaattcagggacaggctttcgacagatgtttgacgatgcggttgctgacaaacgcctctttaaatacttcgttttaggcattcaagaacataataacaaccttttcctatttgactttgtggcaaaatccaagggcattcaatttttaacaggtcaagacatctaccaaatgggccatcaaaaggtctgccgagccattgaccgtttcttagaagggcaagaaagggtctacctgaccattgacatggattgtttctcagttggtgctgcgcctggggttagtgctatccagtccctcggtgttgacccaaatcttgccgtcttagttttgcaacacattgcagctagcggaaaattagttggctttgatgtggttgaggtttcaccaccacacgatattgataaccacaccgccaatttagcagccacctttatcttttacctcgtacagattatggcacaacatagctaa

SEQ ID NO: 1308 - protein, 328 aa, Streptococcus pyogenes
MLEDYYPSTTSYYHGGIDDDLYTAKWGMVMTFLDLNDSSLTPFEGTHFALIGFKSDKGVYINNGRVGAVESPAAIRTQLAKFPWHLGNQVMVYDVGNIDGPNRSLEQLQNSLSKAIKRMCDLNLKPIVLGGGHETAYGHYLGLRQSLSPSDDLAVINMDAHFDLRPYDQTGPNSGTGFRQMFDDAVADKRLFKYFVLGIQEHNNNLFLFDFVAKSKGIQFLTGQDIYQMGHQKVCRAIDRFLEGQERVYLTIDMDCFSVGAAPGVSAIQSLGVDPNLAVLVLQHIAASGKLVGFDVVEVSPPHDIDNHTANLAATFIFYLVQIMAQHS

SEQ ID NO: 1309 - DNA, 1041 bp, Streptococcus pyogenes
atggcagaaattacagctaagcttgtaaaagaattacgtgaaaaatctggtgctggcgttatggacgctaaaaaagcacttgttgaaacagatggtgacatggacaaagccgttgaacttcttcgtgaaaaaggaatggctaaagcagctaaaaaagctgaccgtgttgccgctgaaggtttaacaggcgtttacgttcatggtaacgttgctgctgttgttgaagttaacgctgaaacagactttgttgctaaaaatgctcaattcgttgaattggtaaacgcaactgctaaagttatcgctgaaggcaaaccagctaacaacgatgaagcacttgcacttgttatgccttcaggtgaaactcttgctgaagcttacgttaatgcaactgctaccatcggagaaaaaatctcattccgtcgttttgctttgattgaaaaagcagatgagcaacacttcggtgcttaccaacataatggtggccgtatcggggttatctcagttgtcgaaggcggcgacgatgctcttgctaaacaagtatcaatgcatatcgctgcaatgaaaccaactgttctttcatacactgagcttgatgcacaattcatcaaagatgaacttgctcaattgaaccacgctatcgaacttgacaacgaatctcgtgcaatggttgataaaccagctcttccattcttgaaatacggttcaaaagctcaattatcagacgatgtgattactgctgctgaagcagacatcaaagctgaacttgctgctgaaggcaaaccagaaaagatctgggacaaaatcatcccaggtaaaatggaccgcttcatgcttgacaacactaaagttgaccaagcttacactcttcttgcacaagtttacatcatggacgacagcaaaactgttgaagcttaccttgactcagtaaacgctaaagcgattgcttttgcacgttttgaagttggtgaaggtatcgagaaaaaagctaacgactttgaatcagaagttgcagctactatggctgctgcccttaacaactaa

SEQ ID NO: 1310 - protein, 346 aa, Streptococcus pyogenes
MAEITAKLVKELREKSGAGVMDAKKALVETDGDMDKAVELLREKGMAKAAKKADRVAAEGLTGVYVHGNVAAVVEVNAETDFVAKNAQFVELVNATAKVIAEGKPANNDEALALVMPSGETLAEAYVNATATIGEKISFRRFALIEKADEQHFGAYQHNGGRIGVISVVEGGDDALAKQVSMHIAAMKPTVLSYTELDAQFIKDELAQLNHAIELDNESRAMVDKPALPFLKYGSKAQLSDDVITAAEADIKAELAAEGKPEKIWDKIIPGKMDRFMLDNTKVDQAYTLLAQVYIMDDSKTVEAYLDSVNAKAIAFARFEVGEGIEKKANDFESEVAATMAAALNN

SEQ ID NO: 1311 - DNA, 615 bp, Streptococcus pyogenes
atggcagaaaagtgttggaataatcctaagccaaaggaatggcaggcagaggagttaagtcaaggccggattattgactataaggcttttaactttgttgatggtgaaggggttcgtaattccctttatgtgtctggttgtttattccattgcaaggggtgttataatgctgcgacttggtcttttaaggcgggaatgccttatacgcaagaacttgaagagcagataatgacggatttggcacagccttatgttcagggactgacacttttaggtggagaaccctttttgaatacgggtatcttaattcctctgattaagcgtattcggcgtgaattgccagaaaaagatatttggtcttggacgggttatacttgggaagaaatgatgcttgaaacaccagacaaactggaaatgctgtccttaattgatattctggtagatggtcgttttgatatcacaaaaaagaacctcatgttgcaatttagaggctcttctaaccagcgaattatcgatgttcaaaagtctttggctgctaaagaagtgattatctgggataagttaaacgatggggaccaaacctttgaacaaattagtcgggaggatttgctttaa

SEQ ID NO: 1312 - protein, 204 aa, Streptococcus pyogenes
MAEKCWNNPKPKEWQAEELSQGRIIDYKAFNFVDGEGVRNSLYVSGCLFHCKGCYNAATWSFKAGMPYTQELEEQIMTDLAQPYVQGLTLLGGEPFLNTGILIPLIKRIRRELPEKDIWSWTGYTWEEMMLETPDKLEMLSLIDILVDGRFDITKKNLMLQFRGSSNQRIIDVQKSLAAKEVIIWDKLNDGDQTFEQISREDLL

SEQ ID NO: 1313 - DNA, 936 bp, Streptococcus pyogenes
atgcttaatattgggattgtgggactaggtgctatttcacaaaaagcctatttaccatatatgagacagctgagtgacattacttggcatctatcaacgcggaatgcagcagtacgtcagcaggtcggtcagttatttggtcacgctattctttacagtgatgtcaaggagttgtcaaaaacaaacttagatggggtctttattcatgcggccacatcggcccacgcagagttggctagtttatttttaaatcaggggatcccagtctttatggataaacctatagctgacaattacctgatgacaaagaacctctatgacttagccaaagaaaatcagacttttctgatggcaggatttaacaggcgttttacacctcgtgtcaagaagttgtcaagtttgtcaactaagcgtaaagtggctgttgaaaaaaatgacttgaaccggccaggagatatgacttttaagctctttgatttctttatccatcctttagatacagccttattcttgacagaagggaccttactaaaagggcattttcaatatcatctggaagcaggcttactgagtcaagttatggtaaccttgatgaccgaaagcatgacgactacagcttctatgaatttacaatcagggagtcgccgtgaggtaatggaagttcaacgggctgaagaaacttatcatttagagaacttagacgagttatctatttataaaggtactgaaaaaagggtgcttggctttgcttcttgggacactaccttgcacaaaagaggttttgaaacaatgatcgatgcctttttagaagctattagcacaggcgtcaatcctgtcagccctgagtctagtcttttaagccactggatttgtcaacagattgctgactctcagctttcttatggagagttaacggtagagttgcctaaggattag

SEQ ID NO: 1314 - protein, 311 aa, Streptococcus pyogenes
MLNIGIVGLGAISQKAYLPYMRQLSDITWHLSTRNAAVRQQVGQLFGHAILYSDVKELSKTNLDGVFIHAATSAHAELASLFLNQGIPVFMDKPIADNYLMTKNLYDLAKENQTFLMAGFNRRFTPRVKKLSSLSTKRKVAVEKNDLNRPGDMTFKLFDFFIHPLDTALFLTEGTLLKGHFQYHLEAGLLSQVMVTLMTESMTTTASMNLQSGSRREVMEVQRAEETYHLENLDELSIYKGTEKRVLGFASWDTTLHKRGFETMIDAFLEAISTGVNPVSPESSLLSHWICQQIADSQLSYGELTVELPKD

SEQ ID NO: 1315 - DNA, 561 bp, Streptococcus pyogenes
atgaaacgttgctcatgggttcctaaggataaccagctttactgtgattaccacgatttagaatggggtcaacccctggatgatgatagagatttttttgaattgctgtgccttgaaagttaccagtcaggcttatcctggctgactgttttgaaaaaacgccaagctttcagaactgtttttcatcattacgacattgcatcggttgcaacctttacctcggaggaaatggctgatgctttagagaatccatccattatccgccacaagctaaagctagcagcaactgtcaacaacgctatcgcagtacagaaaattcaaaaagagtttggtagtttttcaacttatctctggaattttgttgggggaaagccaattaacaaccttgtcaatcaagagaatcttgttcctgctcaaacagaattatctattcgcttagctaaggatttaaagaaaagaggatttaaatttttagggcctacaacggtttattcttttatgcaagcatcgggtctggtaaatgaccatgaagaggcttgtgttttcaatagaatcttctaa

SEQ ID NO: 1316 - protein, 186 aa, Streptococcus pyogenes
MKRCSWVPKDNQLYCDYHDLEWGQPLDDDRDFFELLCLESYQSGLSWLTVLKKRQAFRTVFHHYDIASVATFTSEEMADALENPSIIRHKLKLAATVNNAIAVQKIQKEFGSFSTYLWNFVGGKPINNLVNQENLVPAQTELSIRLAKDLKKRGFKFLGPTTVYSFMQASGLVNDHEEACVFNRIF

SEQ ID NO: 1317 - DNA, 1983 bp, Streptococcus pyogenes
atgacaaacattattgaattaccggaagttctcgccaaccaaattgcagctggtgaagttgtagaaaggccagcgagtgttgtcaaggaattggttgagaatgctattgatgctaaaagtagccagattaccgttgaaattgaagagtctggccttaagatgatacaggttacagacaacggtgagggaatgtctcatgaagatttacctttaagtctgcgtcgccacgctactagtaaaattaagagtcagagtgatttgtttagaattagaacacttggcttccgtggagaggctttaccgtctgttgcctctatcagtaaaatcacgataaaaacagcaacaaaagaagtcactcacggttctcttcttatagctactggtggggaaattgagacacttgaagcgatctcaactcctactggaaccaaaattaaggttgaaaaccttttttacaacacgcctgctcgtctcaaatatatgaaaagtttacaggcagaattagctcacattgtagatgtggtcaaccggttgagtttggcacatccagaagttgctttcacactgattagtgatggtcgccaattaactcagacatcaggaactggcgatttacgccaagcaattgcagggatttatggtttgaatactaccaaaaaaatgctggctatctctaatgctgatttggattttgaagtttccggctatgttagcttgccagagttgacacgcgccaaccgtaattacatgacgattttggttaatgggcgttacatcaagaatttcttgcttaatcgagcaattcttgatggttacggttctaagctcatggttggacgtttcccaattgttgtgattgatattcagattgatccctatttggccgatgtcaatgttcaccccacaaaacaagaggttcgtatttcaaaagagcgtgaattaatggctttaattagcacggctatttcagagagtcttaaggaacaagatttgattccagatgctctggaaaatttagccaaatcaagcacacgacatttctctaaaccagagcaaacacaacttcctttacagtctaggggactttattatgatcctcaaaagaatgacttttttgtcaaagagtcggctgtctcggaaaaaatacctgaaactgatttttattccggcgctgttgacaacagtgtaaaggttgaaaaagtagagctgttaccccactcagaagaagttataggaccttcttcggttaaacacgcaagtcgtccccagaatacctttaccgagactgatcatcctaatcttgacttaaaaaacagacaaaagttatctcaaatgctaacccgtttggaaaatgaagggcaatcagtgtttcccgaattggattattttggtcagatgcacggaacttatctctttgctcagggaaaagatggtttatttataattgaccaacacgctgcccaggagcgggttaaatacgaatattatcgtgataagataggtgaggttgacagtagtttacagcaattgttggtgccctatttgtttgagttttctggttctgatttcattaacttacaggagaaaatggcactcttaaatgaagttggtatcttcttagaagtttatgggcacaatactttcattttgagggagcatcctatctggatgaaagaagaagagattgcatctggtgtctatgaaatgtgtgacatgttacttctaaccaatgaggtatctattaaaacttaccgagcagagttagctattatgatgagttgtaaacgatctatcaaggcaaatcatagcttggatgattattcagcaagaaatctgctactgcaattggcccaatgtcaaaatccttataactgccctcatggtagacccgtattgattaattttagtaaggcagatatggaaaaaatgttccgtcgaattcaagaaaatcacactagcctgcgagagctaggaaaatattag

SEQ ID NO: 1318 - protein, 660 aa, Streptococcus pyogenes
MTNIIELPEVLANQIAAGEVVERPASVVKELVENAIDAKSSQITVEIEESGLKMIQVTDNGEGMSHEDLPLSLRRHATSKIKSQSDLFRIRTLGFRGEALPSVASISKITIKTATKEVTHGSLLIATGGEIETLEAISTPTGTKIKVENLFYNTPARLKYMKSLQAELAHIVDVVNRLSLAHPEVAFTLISDGRQLTQTSGTGDLRQAIAGIYGLNTTKKMLAISNADLDFEVSGYVSLPELTRANRNYMTILVNGRYIKNFLLNRAILDGYGSKLMVGRFPIVVIDIQIDPYLADVNVHPTKQEVRISKERELMALISTAISESLKEQDLIPDALENLAKSSTRHFSKPEQTQLPLQSRGLYYDPQKNDFFVKESAVSEKIPETDFYSGAVDNSVKVEKVELLPHSEEVIGPSSVKHASRPQNTFTETDHPNLDLKNRQKLSQMLTRLENEGQSVFPELDYFGQMHGTYLFAQGKDGLFIIDQHAAQERVKYEYYRDKIGEVDSSLQQLLVPYLFEFSGSDFINLQEKMALLNEVGIFLEVYGHNTFILREHPIWMKEEEIASGVYEMCDMLLLTNEVSIKTYRAELAIMMSCKRSIKANHSLDDYSARNLLLQLAQCQNPYNCPHGRPVLINFSKADMEKMFRRIQENHTSLRELGKY

SEQ ID NO: 1319 - DNA, 1146 bp, Streptococcus pyogenes
atgaaaataacagaacataagaagaaaaacggtacaatcgtttatcgtgctagtatttatctaggcattgaccaaatgacaggtaagagagtaaaaacaagcatcacaggaagaacaagaaaagaagttaatcaaaaagccaagcacgcgcagtttgacttcctatctaatggatctacaattaaaagaaaagttgtgattaaaacatttaaagaacttagtcatttatggcttgaaacctataagttaacagtaaagcctcaaacttatgatgctactgttactagacttaatcgacatattatgccaactctgggcaatatgaaggttgataagataaccgctagtgatattcaaatgctgattaatagattatctaaatattacgtcaattatactgcggtacgttcagtcatccgaaaagttctccaacaaggagtattgctagggctaatagattataactcagcaagagatattatccttccaaggaagcagccaaacgctaagaaaaaagttaagtttattgatccgtctgatttgaaatcttttttagaacatttagaaactagtcaacacaaacgctataacctttactttgatgcagttctctaccaacttttattatccactggcttgaggataggcgaagcctgtgcattagagtggggagatattgacctagaaaatggtacaatagccattaataagacttacaataaaaatttgaagtttttgagtacagctaaaacccagtcaggcaatagagtgattagtgttgataaaaagacccttagaagcctaaagctctatcaaatgagacagcgacaattatttaatgaggttggtgcgcgtgtgtcggaggtagtgtttgccacaccaacacgaaagtattttaatgcttcggttagacaaagcgctttagatactaggtgtaaggaagcagggattgaacgctttacctttcacgcttttagacacactcacgctagtttattgctgaacgctggtattagttataaggaacttcagtaccgtctaggacatgcgaatatcagcatgactttggatacctatggccatctttctaagggcaaagaaaaagaagctgttttatattatgaaaaggctatgaataatttataa

SEQ ID NO: 1320 - protein, 381 aa, Streptococcus pyogenes
MKITEHKKKNGTIVYRASIYLGIDQMTGKRVKTSITGRTRKEVNQKAKHAQFDFLSNGSTIKRKVVIKTFKELSHLWLETYKLTVKPQTYDATVTRLNRHIMPTLGNMKVDKITASDIQMLINRLSKYYVNYTAVRSVIRKVLQQGVLLGLIDYNSARDIILPRKQPNAKKKVKFIDPSDLKSFLEHLETSQHKRYNLYFDAVLYQLLLSTGLRIGEACALEWGDIDLENGTIAINKTYNKNLKFLSTAKTQSGNRVISVDKKTLRSLKLYQMRQRQLFNEVGARVSEVVFATPTRKYFNASVRQSALDTRCKEAGIERFTFHAFRHTHASLLLNAGISYKELQYRLGHANISMTLDTYGHLSKGKEKEAVLYYEKAMNNL

SEQ ID NO: 1321 - DNA, 270 bp, Streptococcus pyogenes
atgcgcgtggataaaggagaaatgattatgaaagcaacaacttacaaagagttgaagaaatggattgatgaaggtgttgatttagctgagctagcacagggttacgctggcaaagtaccaaatgcagatcgcgaacagtttgaagcaatcacacaggaaattttcaacgtattggaaggcgtatcgctcatgcttgatgacaaagtgctaatctataatcgcaaagcagagcaaaagcgtttgaatgacattgaacaaggcaattattaa

SEQ ID NO: 1322 - protein, 89 aa, Streptococcus pyogenes
MRVDKGEMIMKATTYKELKKWIDEGVDLAELAQGYAGKVPNADREQFEAITQEIFNVLEGVSLMLDDKVLIYNRKAEQKRLNDIEQGNY

SEQ ID NO: 1323 - DNA, 222 bp, Streptococcus pyogenes
atgaaaagcattaaagaattaaatgaaatcgctaacgacattttggtagattatgaaggtctttgcggtcaacttatggatattctagatgtcctagatttggctgctcaagaatatagtaaggaaacaactagtgcaattataaacacgagttgtagcgctttgaagtgccttatttctgaccatgataagacgacacgtaaatacagaaaggagttgtaa

SEQ ID NO: 1324 - protein, 73 aa, Streptococcus pyogenes
MKSIKELNEIANDILVDYEGLCGQLMDILDVLDLAAQEYSKETTSAIINTSCSALKCLISDHDKTTRKYRKEL

SEQ ID NO: 1325 - DNA, 411 bp, Streptococcus pyogenes
atgactggtacttatgagcaaccagtgattgacgcaacttatcacaatgatgaccaaggtggtcatgctaatcagttagtcttaaaatatgttgaagacagaaagttaagcaaggtcttcaagcgtatctgtgacagtttcaaggactattacaaccaacctgaggatatgacggatgaagaacttgattatcagcgcgtggtttctttatctaaaagtactcaagggaaagttaataatcgagacacacttatagccttcatctccgatcacaaccaactggctgaacacctctctatgaattataaagagatgacgccagaagacttaggggccatccttgagtctatcagtcaagcctttaaccatttgtatgatatggttgttgaaggtcagttactcgttaaatag

SEQ ID NO: 1326 - protein, 136 aa, Streptococcus pyogenes
MTGTYEQPVIDATYHNDDQGGHANQLVLKYVEDRKLSKVFKRICDSFKDYYNQPEDMTDEELDYQRVVSLSKSTQGKVNNRDTLIAFISDHNQLAEHLSMNYKEMTPEDLGAILESISQAFNHLYDMVVEGQLLVK

SEQ ID NO: 1327 - DNA, 309 bp, Streptococcus pyogenes
atgccatcagaaaaagaaatattagatgctcttagtaaagtttatagcgaacaagtaatacaagcagatgattattttcgtcaagcgatcttcgagctcgccagtcaacttgaaaaagaggggatgagctcactcctagctacaaaaattgactcacttatcaatcaatacatcttaacacatcaatttgatgctcctaaaagcatatttgatcttagtcgcttggtaaaaacaaaagctagccattacaagggaactgctatatcagctattatgcttggtagtttcttaagtgggggaccaaaataa

SEQ ID NO: 1328 - protein, 102 aa, Streptococcus pyogenes
MPSEKEILDALSKVYSEQVIQADDYFRQAIFELASQLEKEGMSSLLATKIDSLINQYILTHQFDAPKSIFDLSRLVKTKASHYKGTAISAIMLGSFLSGGPK

SEQ ID NO: 1329 - DNA, 1749 bp, Streptococcus pyogenes
atgaaacgtagcatgtatgcagggcgtgttcgcgaagaacacattggaacgacaatcacattgaaaggatgggtcagtcgtcgtcgtgacttgggtggtctcatctttattgatttgcgtgaccgtgagggtgtgatgcaattagtcattaaccctgaggaagtttccagtgatgtgatggcaactgctgaacgcttacgtagtgaatatgtgattgaagtggaaggttttgttgaagctcgacaacaagccaatgataagttggcgacaggaatggttgagttaaaagtatctgctttgaccattttaaacacagctaaaacgacgccttttgaaattaaagatgacgttgaagtaagtgatgacacgcgtttacgttaccgttacttagatttacgacgtccagaaatgttagaaaacttcaagctacgtgcaaaagtgactcattctatccgtaattaccttgatgaccttgagtttatcgatgtcgagacacctatgttgacaaaatcaactccagaaggtgcgcgtgactatctggtaccaagtcgtgttagccaagggcatttctatgctttgccacaaagtccgcaaataaccaaacagttattgatgaatgctggctttgatcgctattatcaaattgtgaaatgtttccgcgatgaagatctacgtggtgaccgtcaacctgagtttacacaagttgacttggaaacgtcattcctttctgaacaagaaattcaagacatcgttgaaggcatgattgctaaagtgatgaaagagacaaaagaaatagatgtaaccctaccattcccacgtatgagctacgatgtagcaatgaatagctacggctctgataaaccagacacacgttttgaaatgcttttacaagacttgacagtaactgtcaaaggaaatgacttcaaggttttctcagaagcaccagctgtcaaggcgattgtggtgaagggaaatgcagatcgatactctcgtaaagatattgacaaattaactgagtttgccaaacaatttggtgctaaaggccttgcctgggttaaggtgacagatggtcaattggcaggcccagtagccaagttcttgacagctattgagacagagttgtcaagccaattaaaacttgctgagaatgatttggttttatttgtagcggatactcttgaggttgctaataatacattaggtgcccttcgtaatcgtattgccaaggaccttgacatgattgatcagtcgcagtttaatttcctttgggtggttgattggccaatgtttgagtggtcagaagaagaaggacgttatatgtcagctcatcaccccttcactcttccaacgccagaatctgctcatgagttagagggtgatttggctaaggtacgggctattgcttacgacatcgttttaaatggttacgagcttggtggtggtagcctgcgtatcaatcaaaaagagatgcaagagcgcatgttcaaggctcttggctttaccgctgatgaagctaacgaccaatttggtttcttactagaagcgatggactacggctttcctcctcatggtggcttggcaattggtcttgaccgttttgtcatgttgcttgctggaaaagacaatattcgagaagttattgccttccctaaaaataacaaagcctctgatccaatgacgcaagcacctagtcttgtttctgaaaaccaattagaagaactcagtcttcaaatagaaagtcatgattaa

SEQ ID NO: 1330 - protein, 582 aa, Streptococcus pyogenes
MKRSMYAGRVREEHIGTTITLKGWVSRRRDLGGLIFIDLRDREGVMQLVINPEEVSSDVMATAERLRSEYVIEVEGFVEARQQANDKLATGMVELKVSALTILNTAKTTPFEIKDDVEVSDDTRLRYRYLDLRRPEMLENFKLRAKVTHSIRNYLDDLEFIDVETPMLTKSTPEGARDYLVPSRVSQGHFYALPQSPQITKQLLMNAGFDRYYQIVKCFRDEDLRGDRQPEFTQVDLETSFLSEQEIQDIVEGMIAKVMKETKEIDVTLPFPRMSYDVAMNSYGSDKPDTRFEMLLQDLTVTVKGNDFKVFSEAPAVKAIVVKGNADRYSRKDIDKLTEFAKQFGAKGLAWVKVTDGQLAGPVAKFLTAIETELSSQLKLAENDLVLFVADTLEVANNTLGALRNRIAKDLDMIDQSQFNFLWVVDWPMFEWSEEEGRYMSAHHPFTLPTPESAHELEGDLAKVRAIAYDIVLNGYELGGGSLRINQKEMQERMFKALGFTADEANDQFGFLLEAMDYGFPPHGGLAIGLDRFVMLLAGKDNIREVIAFPKNNKASDPMTQAPSLVSENQLEELSLQIESHD

SEQ ID NO: 1331 - DNA, 615 bp, Streptococcus pyogenes
atgattcaaaatgttgttacttcaataatcctgtattctgggacagccgtagacttacttattatcctaatgttattttttgccaaaagaaaaagcagaaaagacatcattaacatctatttaggacaatttctaggctctgttagtctaatattgctaagtttgctttttgcatttgtcttagattatattcctagtaaagagattttaggtttgctcggtttgattccaattttcctaggcctcaaagttttgcttttaggagattctgatggagaagctattgccaaagaaggtttgagcaaagataataaaaacctgatttttctagtcgctatgattacttttgcaagttgtggtgctgacaatattggtgtctttgtcccatattttactaccttaaatttagcgaatttgatagtggctttacttacctttctagtcatgatttatctcttggttttttctgcccaaaaattggcacaagtcccttctgttggagaaactttggaaaaatatagcagatggtttattgccgttgtttatttaggattggggatgtatatcctgattgaaaacaacagctttgacatgctatgggctgtgttaggctag

SEQ ID NO: 1332 - protein, 204 aa, Streptococcus pyogenes
MIQNVVTSIILYSGTAVDLLIILMLFFAKRKSRKDIINIYLGQFLGSVSLILLSLLFAFVLDYIPSKEILGLLGLIPIFLGLKVLLLGDSDGEAIAKEGLSKDNKNLIFLVAMITFASCGADNIGVFVPYFTTLNLANLIVALLTFLVMIYLLVFSAQKLAQVPSVGETLEKYSRWFIAVVYLGLGMYILIENNSFDMLWAVLG

SEQ ID NO: 1333 - DNA, 339 bp, Streptococcus pyogenes
atgaaaaaagatagtatctgtcaagtgggtgttataaatcaacaaaatgttacaaccgcaacgaactaccttgaaaaggaaaaagtccaaaaatcacttcgtattttatcaaaatttaccgataataaacagataaatatcatcttttatctccttgccgtcgaagaactctgtgtctgcgatatagcctgtttattaaatctcagtatggcatctgcctcccaccatcttcgtaaactagccaatcaaaacatcttggacactagaagagaggggaaaattatatattattttataaaagatgaggaaatcagagatttttttaatcaactaggataa

SEQ ID NO: 1334 - protein, 112 aa, Streptococcus pyogenes
MKKDSICQVGVINQQNVTTATNYLEKEKVQKSLRILSKFTDNKQINIIFYLLAVEELCVCDIACLLNLSMASASHHLRKLANQNILDTRREGKIIYYFIKDEEIRDFFNQLG

SEQ ID NO: 1335 - DNA, 642 bp, Streptococcus pyogenes
atgaaggacttattaaaacagtatcaggcaaaaccactaggagaggagaagcggtacgccgtatttttacctcttattcttgtcaatgatgactggcatgtcttatatgaagtcagaagtcagcatatttcacaaccgggggaagtttctttcccagggggacaagtagaaaatcaggagacacttcaagaagctgctatccgagaaacagttgaggaattgactgttgatgcgtcccagatccagctatggggtgaaattgattatttagtacagtcttctagaactattcattgtttcgttggtcaattagtcgttgatgactggaaaagcatacagcctaacgaagaagttgacaaggtctttatagtacctttacgtcagctacttttcactgatcctgtctattatcgtttagaagtcactcctattgagacaacggattttccttttgaccgtattcgtaatgggaaatactaccaatttagtcaagagtaccgtagtattccgttttatgaaaatctagaagaaaccatatggggaatgactgcccagtttactaagtgtttaaccgatattctaaatgatgaatcaattgcaaagaaaaacccctcagatattgaaaaatctaaggggagatag

SEQ ID NO: 1336 - protein, 213 aa, Streptococcus pyogenes
MKDLLKQYQAKPLGEEKRYAVFLPLILVNDDWHVLYEVRSQHISQPGEVSFPGGQVENQETLQEAAIRETVEELTVDASQIQLWGEIDYLVQSSRTIHCFVGQLVVDDWKSIQPNEEVDKVFIVPLRQLLFTDPVYYRLEVTPIETTDFPFDRIRNGKYYQFSQEYRSIPFYENLEETIWGMTAQFTKCLTDILNDESIAKKNPSDIEKSKGR

SEQ ID NO: 1337 - DNA, 1134 bp, Streptococcus pyogenes
atgattgattttattatttctattgatgattgcgcagttgaattggatagtcgtcaatcttggaaaattcgctaccccttatcaaccattctatttcttgtcttcgtttgtcagttagctggcattgaaacctggaaggagatggaagattttattgaaatgaatgaaccattgtttgcgacctacgttgatttgagtgaaggttgtccgtctcatgataccttagagcgtgtgattagtcttgttaattcagaccgtttaaaagagcttaaagttcaatttgagcaatcattgacaagcttagatgccgttcatcaactgatttcagtggacggtaaaacgattcgaggcaatcgaggtaaaaatcagaagcctgttcatattgtaacggcttatgatgggggtcatcatcttagtttgggacaggtagcggttgaggagaaaagtaatgaaattgttgccatccctcagctattgcggacaattgatatccgtaaaagcattgtaacgatagacgcaatgggcacgcagacggctatcgttgatacgattataaaaggtaaagcagactattgcttagccgtcaaaggaaatcaagaaacactttatgatgatattgctctttattttagtgatgccaccttattggaagaactccaagaaaatacgcagtattatcagactgttgaaaaatctaggggacagattgaagttagagaatactgggtgtcttccgatatcaaatggttgtgtcaaaattatcccaaatggcataagttacgtggtattgggatgactcgtaacacgattgataaggatggtcagctgagtcaagagaatcgttattttatctttagctttaagccggatgtcctcacatttgccaattgtgtacgaggtcattggcagatagagagtatgcactggttattggacgttgtttatcatgaagatcatcatcagacattggataaaagagccgcatttaacctaaatcttatccgaaaaatgtgcttatattttctcaaagtgatggtatttcctaaaaaagacctcagttatcgtcgcaaacaacggtatatttctgtccatttggaagattatttagtccaattatttggagaaagaggctaa

SEQ ID NO: 1338 - protein, 377 aa, Streptococcus pyogenes
MIDFIISIDDCAVELDSRQSWKIRYPLSTILFLVFVCQLAGIETWKEMEDFIEMNEPLFATYVDLSEGCPSHDTLERVISLVNSDRLKELKVQFEQSLTSLDAVHQLISVDGKTIRGNRGKNQKPVHIVTAYDGGHHLSLGQVAVEEKSNEIVAIPQLLRTIDIRKSIVTIDAMGTQTAIVDTIIKGKADYCLAVKGNQETLYDDIALYFSDATLLEELQENTQYYQTVEKSRGQIEVREYWVSSDIKWLCQNYPKWHKLRGIGMTRNTIDKDGQLSQENRYFIFSFKPDVLTFANCVRGHWQIESMHWLLDVVYHEDHHQTLDKRAAFNLNLIRKMCLYFLKVMVFPKKDLSYRRKQRYISVHLEDYLVQLFGERG

SEQ ID NO: 1339 - DNA, 273 bp, Streptococcus pyogenes
atgagcgatgcatttacagatgttgcaaaaatgaaaaaaattaaagaggacataagagcccatgaaggacagttagtagaattaacccttgagaatggacggaaacgggaaaaaaataaaattggtaggcttattgaagtttacagttcactctttatcattgagtatagtgatagctctgatactccaggagcaattgataattcttatgtcgaatcatacacctattcagatattttgacagaaaaaacattaattcgttatttagattga

SEQ ID NO: 1340 - protein, 90 aa, Streptococcus pyogenes
MSDAFTDVAKMKKIKEDIRAHEGQLVELTLENGRKREKNKIGRLIEVYSSLFIIEYSDSSDTPGAIDNSYVESYTYSDILTEKTLIRYLD

SEQ ID NO: 1341 - DNA, 1368 bp, Streptococcus pyogenes
atgaggttgcctgaagtagctgaattacgagttcaaccccaagatttactagcagagcaatctgttcttgggtcaatctttatctcacctgataagctgattgcagtgagagaatttatcagtccagacgatttttataagtacgctcataaaattatctttcgggcaatgattaccctcagcgatcgtaatgatgccattgatgcaaccactataagaacaatcctagatgatcaagatgatctgcaaagtattggtggcttatcctatattgttgaactagttaatagtgtcccaactagtgctaatgcagaatattatgctaaaattgtagctgagaaagctatgttgcgtgatattattgctaggttgacagaatctgtcaacctagcttatgatgaaattttaaaaccagaagaggttatcgctggagttgagagagctttaattgaactcaatgaacatagtaatcgtagtgggtttcgcaaaatttcagatgtgctaaaagttaattacgaggctttagaagcacgttctaagcagacttcaaatgttacaggtttaccaactggttttagagaccttgacaagattacaacaggtttacacccagatcaattagttattttagctgctcggccagcagtggggaagactgcctttgttcttaatattgcgcaaaatgtggggactaagcaaaaaaagactgttgctattttttctttggaaatgggtgctgaaagtttagtagatcgtatgcttgcagcagaaggaatggttgattcgcacagtttaagaacagggcaactcacagatcaggattggaataatgtaacaattgctcagggagctttggcagaagcaccgatttatattgacgatacgcccgggattaaaattactgaaatccgcgcaagatcacggaaattgtctcaagaagtggatggtggtttaggtctcattgtaattgactacttacagttgattacaggaactaaacccgaaaatcgtcagcaagaggtttcagatatttcaagacagcttaaaatcctagctaaagaattgaaagtaccagttattgccctaagtcagctttctcgtggcgttgagcaaaggcaagataaacgaccagttttatcagatattcgtgaatcaggatctattgagcaggatgccgatattgtagccttcttataccgggacgattattaccgtaaagaatgtgatgatgctgaagaagctgttgaagataacacaattgaagttatcctcgagaaaaatagagctggggcgcgtggaacagtcaaactgatgttccaaaaagaatacaacaaattctcaagtatagcccagtttgaagaaagataa

SEQ ID NO: 1342 - protein, 455 aa, Streptococcus pyogenes
MRLPEVAELRVQPQDLLAEQSVLGSIFISPDKLIAVREFISPDDFYKYAHKIIFRAMITLSDRNDAIDATTIRTILDDQDDLQSIGGLSYIVELVNSVPTSANAEYYAKIVAEKAMLRDIIARLTESVNLAYDEILKPEEVIAGVERALIELNEHSNRSGFRKISDVLKVNYEALEARSKQTSNVTGLPTGFRDLDKITTGLHPDQLVILAARPAVGKTAFVLNIAQNVGTKQKKTVAIFSLEMGAESLVDRMLAAEGMVDSHSLRTGQLTDQDWNNVTIAQGALAEAPIYIDDTPGIKITEIRARSRKLSQEVDGGLGLIVIDYLQLITGTKPENRQQEVSDISRQLKILAKELKVPVIALSQLSRGVEQRQDKRPVLSDIRESGSIEQDADIVAFLYRDDYYRKECDDAEEAVEDNTIEVILEKNRAGARGTVKLMFQKEYNKFSSIAQFEER

SEQ ID NO: 1343 - DNA, 1122 bp, Streptococcus pyogenes
atgacagataactcaaagatacgtgttgtcgttggtatgagtggtggcgttgattcatctgtaacagctctacttttaaaggagcaaggttatgatgttattggtgtcttcatgaaaaactgggacgatacagatgaatttggtgtttgcacagctactgaagattacaaagatgtagcagccgttgctgataaaatcggtattccttactattcagtcaattttgaaaaagaatattgggacagagtatttgaatatttcttggccgaataccgagcaggtcgtactccaaatcctgatgtcatgtgtaataaggaaataaaatttaaagctttccttgactatgccatgactttaggtgcagattatgtagcaacgggacactatgctcaagtcaagcgtgatgaaaatggtacggttcacatgttacgtggagctgataatggcaaagaccaaacctactttttaagtcaactatcacaggaacaactacaaaagactttattcccccttggtcatttgcaaaagtcagaagttagagaaatcgctgagcgagcagggcttgcaacggctaaaaagaaagattcaacaggtatttgttttattggtgaaaagaatttcaaacagtttttgagccagtacttaccggcacaaaaaggtcgcatgatgactattgatggtcgcgatatgggagaacatgccggccttatgtattatactattggtcagcgtgggggtctgggcattggtggtcagcatggtggggataatcaaccttggtttgttgtcggtaaagatttgtcgcaaaatattttatacgttggtcaaggtttctaccatgaagccctaatgtcaaatagtcttgacgcctcagtcatccattttacacgtgagatgccagaagagttcacatttgaatgtactgctaaatttcgctatcgtcaacccgattcacacgtggcggtgcatgttcgaggagataaggcagaagttgtttttgcagagccacagcgcgcgattactcctggtcaagctgttgttttctatgacggaaaagaatgccttggtggtggtatgattgacatggcttataaaaatgggcagccttgtcagtacatttaa

SEQ ID NO: 1344 - protein, 373 aa, Streptococcus pyogenes
MTDNSKIRVVVGMSGGVDSSVTALLLKEQGYDVIGVFMKNWDDTDEFGVCTATEDYKDVAAVADKIGIPYYSVNFEKEYWDRVFEYFLAEYRAGRTPNPDVMCNKEIKFKAFLDYAMTLGADYVATGHYAQVKRDENGTVHMLRGADNGKDQTYFLSQLSQEQLQKTLFPLGHLQKSEVREIAERAGLATAKKKDSTGICFIGEKNFKQFLSQYLPAQKGRMMTIDGRDMGEHAGLMYYTIGQRGGLGIGGQHGGDNQPWFVVGKDLSQNILYVGQGFYHEALMSNSLDASVIHFTREMPEEFTFECTAKFRYRQPDSHVAVHVRGDKAEVVFAEPQRAITPGQAVVFYDGKECLGGGMIDMAYKNGQPCQYI

SEQ ID NO: 1345 - DNA, 414 bp, Streptococcus pyogenes
atgatatacaaattatttacagaatttatcaccctacaagcccttcttaaagaattaggaattatccaaagtggtggcgctatcaagggatttctcgctgaaacaaccgttctatttaatggtgaagatgagaaacgtcgaggcaaaaaaatcagagtaggggataagatttctctacctgaccaagacttaattatcactattgttgagcctagtcaagaagaaaaagaacaatttgccgaagaaatggctgaaaagacacgtgtagcggctctagtgaaacaaatgaaccaagctaacaaaaagacttcttctaaacataacaatcgtcaatctactaccaaaaaatcactaagagcaactaagaaaactaaaggtaaaccaactgcacctgtccgcttcccaggtatctag

SEQ ID NO: 1346 - protein, 137 aa, Streptococcus pyogenes
MIYKLFTEFITLQALLKELGIIQSGGAIKGFLAETTVLFNGEDEKRRGKKIRVGDKISLPDQDLIITIVEPSQEEKEQFAEEMAEKTRVAALVKQMNQANKKTSSKHNNRQSTTKKSLRATKKTKGKPTAPVRFPGI

SEQ ID NO: 1347 - DNA, 1023 bp, Streptococcus pyogenes
atgacaaaacctattattttaactggagatagaccaactggaaaattacatttaggtcattatgtcggaagtcttaaaaatcgtgtctttttacaaaatgaaaacaagtataagatgtttgttttcttggccgatcaacaggcactgacggatcatgctaaagaatccgaattaattcaagaatctattggaaatgttgccttggattacctctctgtcggtttggatccgaagcaatcaacgatttttattcaaagtcagattccagagctagctgaattgagcatgtattatatgaatctggtatcattagcacgtttggaaagaaatcccactgttaaaaccgaaattgctcagaaaggttttggcgaaagtattccatctggttttttggtttatccagtatcacaggccgctgatattacagcatttaaagcgaatttagtacctgtaggtaacgaccagaaaccgatgattgaacaaacacgtgaaattgtgagaagttttaatcatacttaccatacagactgtttagtagaacctgaaggtatttatccagaaaatgaaaaagctggacgcttacctggtcttgatggcaatgccaaaatgtctaagtcattgggaaatggaatctatctctcagatgatgcagataccgttcgcaaaaaagtgatgagcatgtatactgatccaaatcatattaaaatagaagatcctggtcaaattgaagggaatatggtctttcattatttggatatttttgctagaaaagaagatcaagctgatatcgaagcaatgaaagagcattatcaaataggtggtttaggagatgtgaaaacgaaacgctaccttttagatattttagaacgtgaattagcacctattcgtgaaagacgtttggagtacgctaaagatatgggagaggtgttccgtatgttacaagaaggtagtcaaaaagcaagaactgtggcagccaagactttatcagaagtgaagtcagcaatgggtattaattatttttaa

SEQ ID NO: 1348 - protein, 340 aa, Streptococcus pyogenes
MTKPIILTGDRPTGKLHLGHYVGSLKNRVFLQNENKYKMFVFLADQQALTDHAKESELIQESIGNVALDYLSVGLDPKQSTIFIQSQIPELAELSMYYMNLVSLARLERNPTVKTEIAQKGFGESIPSGFLVYPVSQAADITAFKANLVPVGNDQKPMIEQTREIVRSFNHTYHTDCLVEPEGIYPENEKAGRLPGLDGNAKMSKSLGNGIYLSDDADTVRKKVMSMYTDPNHIKIEDPGQIEGNMVFHYLDIFARKEDQADIEAMKEHYQIGGLGDVKTKRYLLDILERELAPIRERRLEYAKDMGEVFRMLQEGSQKARTVAAKTLSEVKSAMGINYF

SEQ ID NO: 1349 - DNA, 3726 bp, Streptococcus agalactiae
atgaataaacgtatttttgttgagaaaaaggctgactttggcattaaatcggctagtcttgtgaaagagttgacgcataatctacaactggcttctttgaaggatttgcgtatcgtgcaggtctatgatgtcttcaatttggctgaggatttgctggcgcgtgctgagaagcatattttctctgagcaggtgacagaccgtcttttgacagaagctgaaatcactgcggagcttgataaggttgccttctttgccattgaggcgcttcctggtcaatttgaccaacgtgctgctagttcgcaagaagctttgctattgcttggaagtgacagtcaggtcaaggtcaatacagctcagctttacttggtcaataaggatattgcagaagcagagcttgaagccgttaagaactatcttttgaatcccgttgattcacgtttcaaggatattaccttgccacttgaagtgcaggctttctctgtgtctgataagacaatctctaatcttgatttcttcgaaacttatcaggctgacgattttgcagcctataaggcagagcagggattggctatggaggtcgatgaccttctcttcatccaagattatttcaaatcaatcgggcgtgtgccaactgagactgagttgaaagttttggatacgtattggtcagaccactgccgtcacacaacctttgaaactgaattgaaaaacattgatttttcggcctctaaattccaaaaacaattgcaggcgacttatgacaaatacattgccatgcgtgatgagcttggtcgttctgaaaagccgcagacacttatggatatggcgactatctttggtcgttatgagcgtgccaatggtcgtctggacgatatggaagtctcagatgaaatcaatgcctgctcagttgaaattgaagtagatgttgatggtgtgaaagagccttggctcctcatgtttaagaacgagactcacaaccacccaacagaaattgagccatttggtggagcggcgacttgtatcggtggtgccattcgtgacccattgtcaggacgttcatacgtttatcaggctatgcgtatttcaggcgcaggagatatcacgactccgattgcggaaacacgtgctggtaaattgccacaacaggttatttctaagactgcggcgcacggctattcttcatatggtaaccaaattgggcttgcgacaacttatgtgcgtgagtacttccaccctggcttcgtagctaaacgcatggagcttggagctgtggttggtgctgcacctaaggaaaatgtggttcgtgaaaaaccagaggcaggcgatgtggttgtcttgctcggtggtaaaacaggtcgtgacggtgtcggcggtgcgacaggttcatctaaggttcaaacggttgaatctgtggaaacagctggcgcagaggtacaaaaagggaatgccatcgaagaacgtaagattcaacgccttttccgtgatggtaatgtcactcgcctaatcaagaaatcaaatgacttcggtgcaggtggtgtctgtgttgccatcggtgaattagctgatggtcttgaaatcgatttggacaaggtgccacttaaataccaaggtcttaatggtactgaaattgctatctcagaatctcaagaaaggatgtcagttgttgttggtccaagtgatgtggatgccttcatcgcagcctgtaacaaggaaaatatcgatgcagttgttgttgcgacagttactgaaaaaccaaatcttgtcatgacttggaatggtgaaacaattgttgatttggaacgctgtttccttgataccaacggtgttcgtgtcgtagttgatgccaaagtcgttgacaaggacttaacagttccagaagcgcgcacaacatcagcagagacacttgaagcagatatgcttaaggtcttgtctgacctcaatcacgctagtcaaaaaggtcttcaaactatctttgactcatctgttggtcgttcaaccgttaaccacccaatcggtggtcgttaccaaatcacaccgacagaaagttctgttcaaaaattgccagttcaatatggtgtgacaacaacagcatctgttatggctcaaggttacaatccttatattgcagagtggtcaccttatcacggtgctgcctatgctgttattgaagcgacagctcgcttggtagcaacgggtgctgactggtctcgtgcacgtttctcttaccaagagtatttcgagcgtatggataaacaggcagagcgttttggtcagccagtatcagctcttcttggttctattgaggctcagattcaatttggtttgccatcaatcggcggtaaggactctatgtctggtactttcgaagaattgacagtaccaccaaccttggtagctttcggtgtgacaacagcggacagccgcaaggttctctctcctgagtttaaagcggctggtgagaatatctactacattccaggtcaagctatttcagaagatattgattttgaccttatcaaggctaactttagccagtttgaggctattcaagctcaacataagattaccgctgcctcagccgttaaatacggtggtgtcctagaaagtcttgctctcatgacttttggtaaccgtatcggtgcttctgttgaaattgcagagcttgacagcagcttgacagctcaactcggaggctttgtctttacatcagttgaggaaattgctgacgttgtgaagatcggtcaaactcaggcagactttacagtcactgtcaatggaaatgacctagctggtgcaagccttctatcagccttcgaaggtaaattagaagaagtttacccaacagagtttgaacaggtagatgctattgaggaagttcctgctgtggtatcagatgttgttatcaaggctaaggaaattattgaaaaaccagtagtttacatcccagtctttcctggtactaactcagagtacgattcagctaaggcctttgaacaggttggagctagcgtcaacttggtgccatttgtaaccttgaatgaggctgctattgctgagtcagttgatacgatggttgctaatattgctaaggcaaatatcatcttctttgctggaggtttctcagcagcggatgaaccagatggctctgctaagtttatcgtcaatatcttgcttaacgagaaggttcgcgcagctattgacagcttcatcgaaaaaggtggccttatcatcggtatctgtaatggtttccaagcccttgttaaatcaggtcttcttccatacggaaacttcgaggaagctggtgagacaagtccaaccctcttctataacgatgctaaccagcacgttgcaaagatggttgagactcgtatcgcaaataccaattcaccttggttggcaggagttgaggtcggcgatattcatgtcattccagtttcacacggtgaaggtaaatttgttgtcagcgcttctgaatttgcagagctaagagacaatggtcaaatctggagccaatatgtggactttgacggacaaccatctatggattctaaatacaatccaaacggctctgtcaatgccatcgaagggattaccagcaagaatggtcaaatcatcggtaagatggggcactcagaacgctgggaagacggactcttccaaaatatccctggaaacaaagaccaaaaactctttgaaagtgctgtaaaatactttacagggaagtga

SEQ ID NO: 1350 - protein, 1241 aa, Streptococcus agalactiae
MNKRIFVEKKADFGIKSASLVKELTHNLQLASLKDLRIVQVYDVFNLAEDLLARAEKHIFSEQVTDRLLTEAEITAELDKVAFFAIEALPGQFDQRAASSQEALLLLGSDSQVKVNTAQLYLVNKDIAEAELEAVKNYLLNPVDSRFKDITLPLEVQAFSVSDKTISNLDFFETYQADDFAAYKAEQGLAMEVDDLLFIQDYFKSIGRVPTETELKVLDTYWSDHCRHTTFETELKNIDFSASKFQKQLQATYDKYIAMRDELGRSEKPQTLMDMATIFGRYERANGRLDDMEVSDEINACSVEIEVDVDGVKEPWLLMFKNETHNHPTEIEPFGGAATCIGGAIRDPLSGRSYVYQAMRISGAGDITTPIAETRAGKLPQQVISKTAAHGYSSYGNQIGLATTYVREYFHPGFVAKRMELGAVVGAAPKENVVREKPEAGDVVVLLGGKTGRDGVGGATGSSKVQTVESVETAGAEVQKGNAIEERKIQRLFRDGNVTRLIKKSNDFGAGGVCVAIGELADGLEIDLDKVPLKYQGLNGTEIAISESQERMSVVVGPSDVDAFIAACNKENIDAVVVATVTEKPNLVMTWNGETIVDLERCFLDTNGVRVVVDAKVVDKDLTVPEARTTSAETLEADMLKVLSDLNHASQKGLQTIFDSSVGRSTVNHPIGGRYQITPTESSVQKLPVQYGVTTTASVMAQGYNPYIAEWSPYHGAAYAVIEATARLVATGADWSRARFSYQEYFERMDKQAERFGQPVSALLGSIEAQIQFGLPSIGGKDSMSGTFEELTVPPTLVAFGVTTADSRKVLSPEFKAAGENIYYIPGQAISEDIDFDLIKANFSQFEAIQAQHKITAASAVKYGGVLESLALMTFGNRIGASVEIAELDSSLTAQLGGFVFTSVEEIADVVKIGQTQADFTVTVNGNDLAGASLLSAFEGKLEEVYPTEFEQVDAIEEVPAVVSDVVIKAKEIIEKPVVYIPVFPGTNSEYDSAKAFEQVGASVNLVPFVTLNEAAIAESVDTMVANIAKANIIFFAGGFSAADEPDGSAKFIVNILLNEKVRAAIDSFIEKGGLIIGICNGFQALVKSGLLPYGNFEEAGETSPTLFYNDANQHVAKMVETRIANTNSPWLAGVEVGDIHVIPVSHGEGKFVVSASEFAELRDNGQIWSQYVDFDGQPSMDSKYNPNGSVNAIEGITSKNGQIIGKMGHSERWEDGLFQNIPGNKDQKLFESAVKYFTGK

SEQ ID NO: 1351 - DNA, 258 bp, Streptococcus agalactiae
atgttgaaaaaatatgtaaaatggttaattcccatatctattattgggatgttactagcaggctgtcaaatgaatagtgaatctaaaagtcagtcaaacgaagtaaaaaatagcaaacagtcagcagtaaagaaaggtaaaaaagtaataaaaaaagaacaagtagcttatctcaaaaagcatgaaaaagaattaactgaatatgtcaaaatccagatattagtgaaattaagtatgattggaatagtgtgcgcatag

SEQ ID NO: 1352 - protein, 85 aa, Streptococcus agalactiae
MLKKYVKWLIPISIIGMLLAGCQMNSESKSQSNEVKNSKQSAVKKGKKVIKKEQVAYLKKHEKELTEYVKIQILVKLSMIGIVCA

SEQ ID NO: 1353 - DNA, 897 bp, Streptococcus agalactiae
atggcaaaagatataattaaggttgatcatatatttaaaagcatcgggcaaaaaacgattttagaagatatatcatttagtatagcttctaaccaatgtgtagcattgattggacctaatggtgcagggaaaacaactctgatgtcaactttgttaggtgatattagtatttcttcaggatcattgacgatttttaatctgcctgcacaccacaataggttaaaatataaggtggccatcttaccacaagaaaatgtattgccctcaaagtttacagtgagagaactcattgatttccaaaggtgtttatttccagaagtgctgccaatgtctctgattttagactatctacagtggagtgatacgcacttgcaacaatttacagagactttatctggagggcaaaaacgacttttagcttttgttttaactttggttggtaagccccaattactatttttagatgaacctacttccggaatggatacttccacacgtcaacgattttgggagctgattgcgacactaaaaaaagaaggtgtcacaattgtctattctagtcattatatcgaagaggtagaacatacagctgataggattttagtacttcataaaggaaagttattacgcgatacaaccccctttgccatgaagcaagaaaaaaccgaaaagttattcaccgttccgcttagttatcaaaaattattacctacctatttgattacagagtgtgaagccaagagtgatagtataacgtttgttactggggaggctgaagctgtatggaaaatactggcagataatggttgtcctattgaagctattgagatgaccaatagaactttgttaaatcgtatttttgagactactaaggaggtaaaacatgagaatctttaa

SEQ ID NO: 1354 - protein, 298 aa, Streptococcus agalactiae
MAKDIIKVDHIFKSIGQKTILEDISFSIASNQCVALIGPNGAGKTTLMSTLLGDISISSGSLTIFNLPAHHNRLKYKVAILPQENVLPSKFTVRELIDFQRCLFPEVLPMSLILDYLQWSDTHLQQFTETLSGGQKRLLAFVLTLVGKPQLLFLDEPTSGMDTSTRQRFWELIATLKKEGVTIVYSSHYIEEVEHTADRILVLHKGKLLRDTTPFAMKQEKTEKLFTVPLSYQKLLPTYLITECEAKSDSITFVTGEAEAVWKILADNGCPIEAIEMTNRTLLNRIFETTKEVKHENL

SEQ ID NO: 1355 - DNA, 474 bp, Streptococcus agalactiae
ataaacgagcaaggctcacttcctttcctagacagaaagggggtgagaaacatgaaaccatcttcttttcagaccacaatagaaaatcagtttgactatatctgtaaacgtgctatggaagacgagcgaaagaattatatgctttatctttcaaggattgcaaagcgtgaggtgtccttttcggatgttggcgattatcttgttagccagtttgcgacaacagataactattcaactgactttcagatttttacactcaatgggttatcagtaggcgttgaaaatgatttgttgagtgaagcattacgtgagttgccagacaagaaacgtgaaattctactgctgttttactttatggacatgagcgattcagaaattgcagacctgttgaaattgaaccgttctactgtctatcggcatagaaccagtggactagccttaattaaaaagtttatggaggaatttgaagaatga

SEQ ID NO: 1356 - protein, 157 aa, Streptococcus agalactiae
MNEQGSLPFLDRKGVRNMKPSSFQTTIENQFDYICKRAMEDERKNYMLYLSRIAKREVSFSDVGDYLVSQFATTDNYSTDFQIFTLNGLSVGVENDLLSEALRELPDKKREILLLFYFMDMSDSEIADLLKLNRSTVYRHRTSGLALIKKFMEEFEE

SEQ ID NO: 1357 - DNA, 186 bp, Streptococcus agalactiae
ataaactacaagtggatattgtgtcctgtatgtggaaataaaacacgattaaagataagggaagatactgaattaaaaaaattccccctctattgtccgaaatgcagacaagaaaatttaattgaaataaagcagttcaaagtaactgtgattacagagccagacgcaaagacgcagagccgataa

SEQ ID NO: 1358 - protein, 61 aa, Streptococcus agalactiae
MNYKWILCPVCGNKTRLKIREDTELKKFPLYCPKCRQENLIEIKQFKVTVITEPDAKTQSR

SEQ ID NO: 1359 - DNA, 387 bp, Streptococcus agalactiae
atgaaattcaatttagaacaagtaaaagtatttgagaattacgaaattgaaaactgggaagaaggtcaagttaccttaacaacgaaggtcgttgactcttcgctcaactattatggtaatgctcatggtggttatttgtttacactgtgtgatcaagtcagtggtttagttgctatttcaacaggatatgaagcggtaactctacaatcaaatatcaactatttgagggcaggccgattagatgatctgcttactgtcatcggtacttgtgttcataatggtcgtactacaaaagtcgttgatgttcacattaaaaatcagaaaggcgaaatggttacaactgctatttttacaatgtttgtaactggagagagaaaagagaagtaa

SEQ ID NO: 1360 - protein, 128 aa, Streptococcus agalactiae
MKFNLEQVKVFENYEIENWEEGQVTLTTKVVDSSLNYYGNAHGGYLFTLCDQVSGLVAISTGYEAVTLQSNINYLRAGRLDDLLTVIGTCVHNGRTTKVVDVHIKNQKGEMVTTAIFTMFVTGERKEK

SEQ ID NO: 1361 - DNA, 276 bp, Streptococcus agalactiae
atgtcaacatttaaacgctatgatgaagaattcaaacaatctcttgttaacctttatcaaactggaaaaactcagtctgaactctgtaaagactatggggtatccacttctacgcttgcaaaatggatcaaacagtattcccaagtcaaactcgaagataattctgtacttactgccaagcaaatacaagagttacaaaaacgtaatgcgcagcttgaagaggagaaccttatcctaaaaaaagcaagtgccatattcatgcaaaacttaaagtaa

SEQ ID NO: 1362 - protein, 91 aa, Streptococcus agalactiae
MSTFKRYDEEFKQSLVNLYQTGKTQSELCKDYGVSTSTLAKWIKQYSQVKLEDNSVLTAKQIQELQKRNAQLEEENLILKKASAIFMQNLK

SEQ ID NO: 1363 - DNA, 645 bp, Streptococcus agalactiae
atgtctatcaaattaagtcctcaactttcctttggcgaagagcttgcaaatagtatcactcacgctgtaggagctttgcttatgctaatcctattaccaatcaccgctgtctatagtcacaaccacttcggattacaagcagcacttggtacctcaatattcgtcacttctttatttttgatgtttttatcatcaagtatttaccactccatgacttataacagtcttcaaaaatatgttctacgcatgattgatcactctatgatttatattgctattgcaggtagttatactcctgtcgcattgtcacttattggcggctggttaggatatctcatcatttttttacaatgggggattacattatttggtatcctttataaaatcttcgctcccaaaatcaatgataaatttagccttgtactttacctcattatgggatggctggttatctttattttccctgctattatcacaaaaactggaccagctttttggggattactcttggctggtggtatttgctatactatcggtgcactcttttatgctcgcaaacgtccttatgatcacatgatttggcacctttttattctattagcttctattttacaatacattggaattgtctacttcatgctataa

SEQ ID NO: 1364 - protein, 214 aa, Streptococcus agalactiae
MSIKLSPQLSFGEELANSITHAVGALLMLILLPITAVYSHNHFGLQAALGTSIFVTSLFLMFLSSSIYHSMTYNSLQKYVLRMIDHSMIYIAIAGSYTPVALSLIGGWLGYLIIFLQWGITLFGILYKIFAPKINDKFSLVLYLIMGWLVIFIFPAIITKTGPAFWGLLLAGGICYTIGALFYARKRPYDHMIWHLFILLASILQYIGIVYFML

SEQ ID NO: 1365 - DNA, 915 bp, Streptococcus agalactiae
atgactaaaaaagaaaaaggaacaatgatgaccttagctgccggactagcatggggcatttctggaattagtggtcaatacttgatgtcgcacggagtacacgttaaccttttgacttctttacgattgttgataacaggtatctttctcttgtctttagctagatcaaaacaaaaggagcatttagtagcagcgtggaaacagccaaaatttttaaagcaggttttacttttttctatatttggtttagttttaaatcaatatgcttttctcagagcgattcatttaacaaatgctggaactgcaacggttttgcaatatatggcaccaatacttattttgagtattgtttgtatcctaaacagacaaagaccaacatcttttgaaataatagcaattgctatggcaattttaggaacctatatgattgcaacgcatgggaagttaggaagtttagctatcacaccgaaaggattaatgtgggggcttggttccgccattacttattctatttatattttattacctgtgaaacttattcatgaatggggaagtacgattgttattggttcaggaatgtttataggtgggattttatttagtttggtgacaaaagcgtggcaataccccttacaaattaatgtgatgagtatacttgcttatattggcattattggtattgggactatttttgcttacacttttttccttaaaggggttagtattgtaggtgctgtcaagggtagcttattagcatcggtagagccagtttcttcggtatttttgacagtacttgttttaggagaaattttttatccaatagatttacttgggatgctgtttatttttcttgctgtaactctaatctcttacaaagatttaattgcattgaagaaaatgaaacgagtaagatag

SEQ ID NO: 1366 - protein, 304 aa, Streptococcus agalactiae
MTKKEKGTMMTLAAGLAWGISGISGQYLMSHGVHVNLLTSLRLLITGIFLLSLARSKQKEHLVAAWKQPKFLKQVLLFSIFGLVLNQYAFLRAIHLTNAGTATVLQYMAPILILSIVCILNRQRPTSFEIIAIAMAILGTYMIATHGKLGSLAITPKGLMWGLGSAITYSIYILLPVKLIHEWGSTIVIGSGMFIGGILFSLVTKAWQYPLQINVMSILAYIGIIGIGTIFAYTFFLKGVSIVGAVKGSLLASVEPVSSVFLTVLVLGEIFYPIDLLGMLFIFLAVTLISYKDLIALKKMKRVR

SEQ ID NO: 1367 - DNA, 453 bp, Streptococcus agalactiae
atgtcacaaaaatatgaacgcatccttgtcgctattgatggatcaacagaatctgaacttgcttttgaaaaggcagttaacgttgctcttcgcaatgattctgaattaatcttgacacatgttatagatacacgtgctttacaaagctttgcgacatttgatacttatatctatgaaaaattagaaaaagaagcaaaagatgtccttgaggaatatgaaaaacaagctcgtgaaaaaggagcagataaagttagacaagtcattgaatttggtaatcccaaaacattacttgcacatgatattccagaaaaagaaaaagtagacttgattatggttggtgcaacaggtcttaatacctttgaacgtttccttatcggatcttcctcagaatacatccttcgtcacgctaaagtagatttactcattgtacgtgaccctaataaaacaatgtaa

SEQ ID NO: 1368 - protein, 150 aa, Streptococcus agalactiae
MSQKYERILVAIDGSTESELAFEKAVNVALRNDSELILTHVIDTRALQSFATFDTYIYEKLEKEAKDVLEEYEKQAREKGADKVRQVIEFGNPKTLLAHDIPEKEKVDLIMVGATGLNTFERFLIGSSSEYILRHAKVDLLIVRDPNKTM

SEQ ID NO: 1369 - DNA, 1341 bp, Streptococcus agalactiae
atgtctaggaaaacatttaaacgtatactatcgattggagtttgcacgctcgtactatcgatgagtctttattacactgaaaaagcccacgctattgctggtcctagtgaccgccaatacgtagaaaacccaaatcctcacattattgtaaatgttacaggtactgatcaaaacggaaatagcattttaccgcattatatcgaagtcaatgtaaagatgggacaaactttaagtaaaaaagaaattctagattatattgctcgaaatttaaactctagtgttggaggagaaagtaaaaacgttcaatacagcaacatcgagtttaaggaaagtgcttatctgaagcgtcaattagatgatggcaagacagaagaaatagcaattgataacgacggtgttactgtacctaaagacggtccaaacaaattttggattgacgttccagtaacttgtacggtaaattcaataactccaaagctccataaagtagaatggggtacacctatttcagttttacattatgtacagttcgttgataaaactacaggtaaaactttagaggattttaaaactattgattttgctgaaatcgaccttggaattcgacataccggtgatagcattaccgataaggaactatataactcagcttacagtgcctttttaagaagtaaattaactaagcaaggttatcaattccaatacagaattagtacagatgttcaacaaaatcttcaagtcaccaaaaaactttacaactacgatgtaaatgaagaattgattaactatcaaatcgaaaacaatagacccacactaaacctatctaatgaagccgagactgatatctttttcgaaagatattatgtttctagagatggagatagtttagcacgtacagaatcaacaatttcgattaaaatggttgatgccaaaactgaacaaccgctatttaaccacacattaacgggttatcaattgtcaactgtttccaatgtctataacagactctttgaagaaaatcttatcccaactacaaaatcaggagaaaaatattttattcaaaatatgaaaaaaacagctgaacaagaatatactgtttacctttcagaaacaccttattctgaagagaacgctcccgtaatttcttatgatgcaagacctgttgattgggattatcactcaggcgcttcaggatcacttgaaaatcagcctaacatctatactgaagaagattcaactgaatttttgggtaataaaccacaagcagcttgttatccaaacaaacaatttgcttgcgaaaatactgactctaaatacaactatagctatttagaaaaatag

SEQ ID NO: 1370 - protein, 446 aa, Streptococcus agalactiae
MSRKTFKRILSIGVCTLVLSMSLYYTEKAHAIAGPSDRQYVENPNPHIIVNVTGTDQNGNSILPHYIEVNVKMGQTLSKKEILDYIARNLNSSVGGESKNVQYSNIEFKESAYLKRQLDDGKTEEIAIDNDGVTVPKDGPNKFWIDVPVTCTVNSITPKLHKVEWGTPISVLHYVQFVDKTTGKTLEDFKTIDFAEIDLGIRHTGDSITDKELYNSAYSAFLRSKLTKQGYQFQYRISTDVQQNLQVTKKLYNYDVNEELINYQIENNRPTLNLSNEAETDIFFERYYVSRDGDSLARTESTISIKMVDAKTEQPLFNHTLTGYQLSTVSNVYNRLFEENLIPTTKSGEKYFIQNMKKTAEQEYTVYLSETPYSEENAPVISYDARPVDWDYHSGASGSLENQPNIYTEEDSTEFLGNKPQAACYPNKQFACENTDSKYNYSYLEK

SEQ ID NO: 1371 - DNA, 198 bp, Streptococcus agalactiae
atgtctgaagaaaaatttgatgcaaaagttgataaggtttctggttcagtaaaagaatctgttgggaaacttactggcgataaagaagttgaatctgaaggtaaagttgataaattgaaaggtcatgcaaaagaaaaacttgctgacattaaagataccattaagggtgcttcagagagctttaagaaaaaggactag

SEQ ID NO: 1372 - protein, 64 aa, Streptococcus agalactiae
MSEEKFDAKVDKVSGSVKESVGKLTGDKEVESEGKVDKLKGHAKEKLADIKDTIKGASESFKKK

(The sequence listing continues in the following parts.)
